(19) United States
(12) Patent Application Publication
(10) Pub. No.: US 2026/0071237 A1
(43) Pub. Date: Mar. 12, 2026

(54) ENGINEERED ADENO-ASSOCIATED VIRUS CAPSIDS

(71) Applicants: The Broad Institute, Inc., Cambridge, MA (US); President and Fellows of Harvard College, Cambridge, MA (US); Massachusetts Institute of Technology, Cambridge, MA (US)

(72) Inventors: Pardis Sabeti, Cambridge, MA (US); Mohammadsharif Tabebordbar, Cambridge, MA (US); Simon Ye, Cambridge, MA (US)

(21) Appl. No.: 19/390,128

(22) Filed: Nov. 14, 2025

Related U.S. Application Data
(63) Continuation of application No. 17/642,541.
(60) Provisional application No. 62/899,453, filed on Sep. 12, 2019.
(60) Provisional application No. 62/916,185, filed on Oct. 16, 2019.

(51) Int. Cl. C12N 15/86; C12N 7/00; C12N 15/10

(52) U.S. Cl. CPC C12N 15/86; C12N 7/00; C12N 15/1062; C12N 2750/14122; C12N 2750/14123; C12N 2750/14142; C12N 2750/14145; C12N 2750/14151; C12N 2830/50

(57) ABSTRACT

Described herein are methods of generating engineered viral capsid variants. Also described herein are engineered viral capsid variants, engineered viral particles and formulations and cells thereof. Also described herein are vector systems containing an engineered viral capsid polynucleotide and uses thereof.

### CROSS-REFERENCE TO RELATED APPLICATIONS

[0001] This application is a continuation of U.S. patent application Ser. No. 17/642,541, filed on Mar. 11, 2022, which is the U.S. National Stage Application under 35 U.S.C. § 371 of Patent Cooperation Treaty Application No.: PCT/US2020/050534, filed on Sep. 11, 2020. Patent Cooperation Treaty Application No.: PCT/US2020/050534 claims the benefit of and priority to U.S. Provisional Patent Application No. 62/899,453, filed on Sep. 12, 2019, and U.S. Provisional Patent Application No. 62/916,185, filed on Oct. 16, 2019. The entire contents of the above-identified applications are hereby fully incorporated herein by reference.

### SEQUENCE LISTING

[0002] This application contains an electronic sequence listing entitled BROD-4400US-CON2_ST26, created on Nov. 14, 2025, and having a size of 10,195,472 bytes. The content of the sequence listing is incorporated herein in its entirety.

### TECHNICAL FIELD

[0003] The subject matter disclosed herein is generally directed to recombinant adeno-associated virus (AAV) vectors and systems thereof, compositions, and uses thereof.

### BACKGROUND

[0004] Recombinant AAVs (rAAVs) are the most commonly used delivery vehicles for gene therapy and gene editing. Nonetheless, rAAVs that contain natural capsid variants have limited cell tropism. Indeed, rAA Vs used today mainly infect the liver after systemic delivery. Further, the transduction efficiency of conventional rAAVs in other cell-types, tissues, and organs by these conventional rAAVs with natural capsid variants is limited. Therefore, AAV-mediated polynucleotide delivery for diseased that affect cells, tissues, and organs other than the liver (e.g. nervous system, skeletal muscle, and cardiac muscle) typically requires an injection of a large dose of virus (typically about 1×10¹⁴ vg/kg), which often results in liver toxicity. Furthermore, because large doses are required when using conventional rAAVs, manufacturing sufficient amounts of a therapeutic rAAV needed to dose adult patients is extremely challenging. Additionally, due to differences in gene expression and physiology, mouse and primate models respond differently to viral capsids. Transduction efficiency of different virus particles varies between different species, and as a result, preclinical studies in mice often do not accurately reflect results in primates, including humans. As such there exists a need for improved rAAVs for use in the treatment of various genetic diseases.

### SUMMARY

[0005] In certain example embodiments, provided herein are various embodiments of engineered adeno-associated virus (AAV) capsids that can be engineered to confer cell-specific tropism to an engineered AAV particle. The engineered capsids can be included in an engineered virus particle and can confer cell-specific tropism, reduced immunogenicity, or both to the engineered AAV particle. The engineered AAV capsids described herein can include one or more engineered AAV capsid proteins described herein. The engineered AAV capsid and/or capsid proteins can be encoded by one or more engineered AAV capsid polynucleotides. In some embodiments, an engineered AAV capsid polynucleotide can include a 3′ polyadenylation signal. The polyadenylation signal can be an SV40 polyadenylation signal. In some embodiments, the engineered AAV capsid protein can have an n-mer amino acid motif, where n can be at least 3 amino acids. In some embodiments, n can be 3, 4, 5, 6, 7, 8, 9, 10, 11, 12, 13, 14, or 15 amino acids.

[0006] In certain example embodiments, also provided herein are methods of generating engineered AAV capsids. In some embodiments, the method of generating an AAV capsid variant can include the steps of (a) expressing a vector system described herein that contains an engineered AAV capsid polynucleotide in a cell to produce engineered AAV virus particle capsid variants; (b) harvesting the engineered AAV virus particle capsid variants produced in step (a); (c) administering engineered AAV virus particle capsid variants to one or more first subjects, wherein the engineered AAV virus particle capsid variants are produced by expressing an engineered AAV capsid variant vector or system thereof in a cell and harvesting the engineered AAV virus particle capsid variants produced by the cell; and (d) identifying one or more engineered AAV virus particle capsid particle variants produced at a significantly high level by one or more specific cells or specific cell types in the one or more first subjects. The method can further include the steps of (e) administering some or all engineered AAV virus particle capsid variants identified in step (d) to one or more second subjects; and (f) identifying one or more engineered AAV virus particle capsid variants produced at a significantly high level in one or more specific cells or specific cell types in the one or more second subjects. The cell in step (a) can be a prokaryotic cell or a eukaryotic cell. In some embodiments, the administration in step (c), step (e), or both is systemic. In some embodiments, one or more first subjects, one or more second subjects, or both, are non-human mammals. In some embodiments, one or more first subjects, one or more second subjects, or both, are each independently selected from the group consisting of a wild-type non-human mammal, a humanized non-human mammal, a disease-specific non-human mammal model, and a non-human primate.

[0007] In certain example embodiments, also provided herein are vectors and vector systems that can contain one or more of the engineered AAV capsid polynucleotides described herein. As used in this context, engineered AAV capsid polynucleotides refers to any one or more of the polynucleotides described herein capable of encoding an engineered AAV capsid as described elsewhere herein and/or polynucleotide(s) capable of encoding one or more engineered AAV capsid proteins described elsewhere herein. Further, where the vector includes an engineered AAV capsid polynucleotide described herein, the vector can also be referred to and considered an engineered vector or system thereof although not specifically noted as such. In embodiments, the vector can contain one or more polynucleotides encoding one or more elements of an engineered AAV capsid described herein. In some embodiments, one or more of the polynucleotides that are part of the engineered AAV capsid and system thereof described herein can be included in a vector or vector system.

[0008] In certain example embodiments, the vector can include an engineered AAV capsid polynucleotide having a 3′ polyadenylation signal. In some embodiments, 3′ polyadenylation is an SV40 polyadenylation signal. In some embodiments, the vector does not have splice regulatory elements. In some embodiments, the vector includes one or more minimal splice regulatory elements. In some embodiments, the vector can further include a modified splice regulatory element, wherein the modification inactivates the splice regulatory element. In some embodiments, the modified splice regulatory element is a polynucleotide sequence sufficient to induce splicing between a rep protein polynucleotide and the engineered AAV capsid protein variant polynucleotide. In some embodiments, the polynucleotide sequence can be sufficient to induce splicing is a splice acceptor or a splice donor. In some embodiments, the AAV capsid polynucleotide is an engineered AAV capsid polynucleotide as described elsewhere herein. In some exemplary embodiments, the vectors and/or vector systems can be used, for example, to express one or more of the engineered AAV capsid polynucleotides in a cell, such as a producer cell, to produce engineered AAV particles containing an engineered AAV capsid described elsewhere herein.

[0009] In certain example embodiments, also provided herein are engineered AAV capsid virus particles that can contain an engineered AAV capsid as described in detail elsewhere herein. An engineered AAV capsid is one that contains one or more engineered AAV capsid proteins as are described elsewhere herein. In some embodiments, the engineered AAV particles can include 1-60 engineered AAV capsid proteins described herein. In some embodiments, the engineered AAV capsid can confer a cell-cell specific tropism, reduce immunogenicity, or both to the engineered AAV capsid virus particle. The engineered AAV capsid virus particle can include one or more cargo polynucleotides. In some embodiments, the engineered AAV capsid virus particle described herein can be used to deliver a cargo polynucleotide to a cell. In some embodiments, the cargo polynucleotide is a gene modification polynucleotide. In some embodiments, the cargo polynucleotide is a component or encodes a component of a CRISPR-Cas system.

[0010] In certain example embodiments, also provided herein are engineered cells that can include one or more of the engineered AAV capsid polynucleotides, polypeptides, vectors, and/or vector systems. In some embodiments, one or more of the engineered AAV capsid polynucleotides can be expressed in the engineered cells. In some embodiments, the engineered cells can be capable of producing engineered AAV capsid proteins and/or engineered AAV capsid particles that are described elsewhere herein.

[0011] In certain example embodiments, also provided herein are modified or engineered organisms that can include one or more engineered cells described herein.

[0012] In certain example embodiments, component(s) of the engineered AAV capsid system, engineered cells, engineered AAV capsid particles, and/or combinations thereof can be included in a formulation that can be delivered to a subject or a cell. In certain example embodiments, also provided herein are pharmaceutical formulations containing an amount of one or more of the engineered AAV capsid polypeptides, polynucleotides, vectors, cells, or combinations thereof described herein.

[0013] In certain example embodiments, also provided herein are kits that contain one or more of the one or more of the engineered AAV capsid polypeptides, polynucleotides, vectors, cells, or other components described herein, or a combination thereof, or one or more pharmaceutical formulations described herein. In some exemplary embodiments, one or more of the polypeptides, polynucleotides, vectors, cells, and combinations thereof described herein can be presented as a combination kit.

[0014] In certain example embodiments, provided herein are methods of using the engineered AAV capsid variants, virus particles, cells and formulations thereof. In some exemplary embodiments, the engineered AAV capsid system polynucleotides, polypeptides, vector(s), engineered cells, engineered AAV capsid particles can be used generally to package and/or deliver one or more cargo polynucleotides to a recipient cell. In some exemplary embodiments, delivery is done in cell-specific manner based upon the tropism of the engineered AAV capsid.

[0015] In some exemplary embodiments, provided herein are methods of using the engineered AAV capsid polynucleotides, vectors, and systems thereof to generate engineered AAV capsid variant libraries that can be mined for variants with a desired cell-specificity.

[0016] In some exemplary embodiments, provided herein are methods using the engineered AAV capsid variants to deliver a therapeutic cargo polynucleotide to a subject in need thereof. In some embodiments, the therapeutic cargo polynucleotide can be and/or encode a component of a CRISPR-Cas system. In some embodiments, the subject in need thereof can have a disease having a genetic or epigenetic embodiments. In some embodiments, the subject in need thereof can have a muscle disease.

[0017] In some exemplary embodiments, provided herein are methods of using the engineered AAV capsid virus particles to deliver a cargo polynucleotide capable of modifying a recipient cell to the recipient cell for use in adoptive cell therapy. In some exemplary embodiments, the recipient cell is a T cell. In some exemplary embodiments, the recipient cell is a B cell. In some exemplary embodiments, the cell is a CAR T cell.

[0018] In some exemplary embodiments, provided herein are methods of using the engineered AAV capsid virus particles to deliver a cargo polynucleotide capable of modifying a recipient cell to create a gene drive in the recipient cell.

[0019] In some exemplary embodiments, provided herein are methods of using the engineered AAV capsid virus particles to deliver a cargo polynucleotide capable of modifying recipient cells, tissues, and/or organs for transplantation.

[0020] Described in certain example embodiments herein are vectors comprising: an adeno-associated (AAV) capsid protein polynucleotide, wherein the AAV capsid protein polynucleotide comprises a 3′ polyadenylation signal.

[0021] In certain example embodiments, the vector does not comprise splice regulatory elements.

[0022] In certain example embodiments, the vector comprises minimal splice regulatory elements.

[0023] In certain example embodiments, the vector further comprises a modified splice regulatory element, wherein the modification inactivates the splice regulatory element.

[0024] In certain example embodiments, the modified splice regulatory element is a polynucleotide sequence sufficient to induce splicing, between a rep protein polynucleotide and the capsid protein polynucleotide.

[0025] In certain example embodiments, the polynucleotide sequence sufficient to induce splicing is a splice acceptor or a splice donor.

[0026] In certain example embodiments, the polyadenylation signal is an SV40 polyadenylation signal.

[0027] In certain example embodiments, the AAV capsid polynucleotide is an engineered AAV capsid polynucleotide.

[0028] In certain example embodiments, the engineered AAV capsid polynucleotide comprises a n-mer motif polynucleotide capable of encoding an n-mer amino acid motif, wherein the n-mer motif comprises three or more amino acids, wherein the n-mer motif polynucleotide is inserted between two codons in the AAV capsid polynucleotide within a region of the AAV capsid polynucleotide capable of encoding a capsid surface.

[0029] In certain example embodiments, the n-mer motif comprises 3-15 amino acids.

[0030] In certain example embodiments, the n-mer motif is 6 or 7 amino acids.

[0031] In certain example embodiments, the n-mer motif polynucleotide is inserted between the codons corresponding to any two contiguous amino acids between amino acids 262-269, 327-332, 382-386, 452-460, 488-505, 527-539, 545-558, 581-593, 704-714, or any combination thereof in an AAV9 capsid polynucleotide or in an analogous position in an AAV2, AAV3, AAV4, AAV5, AAV6, AAV7, AAV8 capsid polynucleotide.

[0032] In certain example embodiments, the n-mer motif polynucleotide is inserted between the codons corresponding to aa588 and 589 in the AAV9 capsid polynucleotide.

[0033] In certain example embodiments, the vector is capable of producing AAV virus particles having increased specificity, reduced immunogenicity, or both.

[0034] In certain example embodiments, the vector is capable of producing AAV virus particles having increased muscle cell, specificity, reduced immunogenicity, or both.

[0035] In certain example embodiments, the n-mer motif polynucleotide is any polynucleotide in any of Tables 1-6.

[0036] In certain example embodiments, the n-mer motif polynucleotide is capable of encoding a peptide as in any of Tables 1-6.

[0037] In certain example embodiments, the n-mer motif polynucleotide is capable of encoding three or more amino acids, wherein the first three amino acids are RGD.

[0038] In certain example embodiments, the n-mer motif has a polypeptide sequence of RGD or RGDXₙ, where n is 3-15 amino acids and X, where each amino acid present are independently selected from the others from the group of any amino acid.

[0039] In certain example embodiments, the vector is capable of producing an AAV capsid polypeptide, AAV capsid, or both that have a muscle-specific tropism.

[0040] Described in certain example embodiments herein are vector systems comprising: a vector as described elsewhere herein; an AAV rep protein polynucleotide or portion thereof; and a single promoter operably coupled to the AAV capsid protein, AAV rep protein, or both, wherein the single promoter is the only promoter operably coupled to the AAV capsid protein, AAV rep protein, or both.

[0041] Described in certain example embodiments herein, are vector systems comprising a vector as described herein; and an AAV rep protein polynucleotide or portion thereof.

[0042] In certain example embodiments, the vector system further comprises a first promoter, wherein the first promoter is operably coupled to the AAV capsid protein, AAV rep protein, or both.

[0043] In certain example embodiments, the first promoter or the single promoter is a cell-specific promoter.

[0044] In certain example embodiments, the first promoter is capable of driving high-titer viral production in the absence of an endogenous AAV promoter.

[0045] In certain example embodiments, the endogenous AAV promoter is p40.

[0046] In certain example embodiments, the AAV rep protein polynucleotide is operably coupled to the AAV capsid protein.

[0047] In certain example embodiments, the AAV protein polynucleotide is part of the same vector as the AAV capsid protein polynucleotide.

[0048] In certain example embodiments, the AAV protein polynucleotide is on a different vector as the AAV capsid protein polynucleotide.

[0049] Described in example embodiments herein are polypeptides encoded by a vector as described herein or by a vector system as described herein.

[0050] Described in example embodiments herein are cells comprising: a vector as described herein, a vector system as described herein, a polypeptide as described herein, or any combination thereof.

[0051] In certain example embodiments, the cell is prokaryotic.

[0052] In certain example embodiments, the cell is eukaryotic.

[0053] Described in certain example embodiments herein are engineered adeno-associated virus particle produced by the method comprising: expressing a vector as described herein, a vector system as described herein, or both in a cell.

[0054] In certain example embodiments, the step of expressing the vector system occurs in vitro or ex vivo.

[0055] In certain example embodiments, the step of expressing the vector system occurs in vivo.

[0056] Described in certain example embodiments herein are methods of identifying cell-specific adeno-associated virus (AAV) capsid variants, comprising:
[0057] (a) expressing a vector system as described herein in a cell to produce AAV engineered virus particle capsid variants;
[0058] (b) harvesting the engineered AAV virus particle capsid variants produced in step (a);
[0059] (c) administering engineered AAV virus particle capsid variants to one or more first subjects, wherein the engineered AAV virus particle capsid variants are produced by expressing a vector system as described herein in a cell and harvesting the engineered AAV virus particle capsid variants produced by the cell; and
[0060] (d) identifying one or more engineered AAV capsid variants produced at a significantly high level by one or more specific cells or specific cell types in the one or more first subjects.

[0061] In certain example embodiments, the method further comprises
[0062] (e) administering some or all engineered AAV virus particle capsid variants identified in step (d) to one or more second subjects; and
[0063] (f) identifying one or more engineered AAV virus particle capsid variants produced at a significantly high level in one or more specific cells or specific cell types in the one or more second subjects.

[0064] In certain example embodiments, the cell is a prokaryotic cell.

[0065] In certain example embodiments, cell is a eukaryotic cell.

[0066] In certain example embodiments, administration in step (c), step (e), or both is systemic.

[0067] In certain example embodiments, the one or more first subjects, one or more second subjects, or both, are non-human mammals.

[0068] In certain example embodiments, the one or more first subjects, one or more second subjects, or both, are each independently selected from the group consisting of: a wild-type non-human mammal, a humanized non-human mammal, a disease-specific non-human mammal model, and a non-human primate.

[0069] Described in certain example embodiments herein are vector systems comprising a vector comprising a cell-specific capsid polynucleotide, wherein the cell-specific capsid polynucleotide encodes a cell-specific capsid protein; and optionally, a regulatory element operatively coupled to the cell-specific capsid polynucleotide.

[0070] In certain example embodiments herein, the cell-specific capsid polynucleotide is identified by a method as described herein and as further described elsewhere herein.

[0071] In certain example embodiments, the vector system further comprises a cargo.

[0072] In certain example embodiments, the cargo is a cargo polynucleotide encodes a gene-modification molecule, a non-gene modification polypeptide, a non-gene modification RNA, or a combination thereof.

[0073] In certain example embodiments, the cargo polynucleotide is present on the same vector or a different vector than the cell-specific capsid polynucleotide.

[0074] In certain example embodiments, the vector system is capable of producing a cell-specific capsid polynucleotide and/or polypeptide.

[0075] In certain example embodiments, the cell-specific capsid polynucleotide is a cell-specific adeno-associated virus (AAV) capsid polynucleotide that encodes a cell-specific AAV capsid polypeptide.

[0076] In certain example embodiments, the vector system is capable of producing virus particles comprising the cell-specific capsid protein and that further comprise the cargo when present.

[0077] In certain example embodiments, the viral particles are AAV viral particles.

[0078] In certain example embodiments, the viral particles are engineered AAV1, AAV2, AAV3, AAV4, AAV5, AAV6, AAV7, AAV8, AAV9, AAV rh.74, or AAV rh.10 viral particles.

[0079] In certain example embodiments, the cell-specific viral capsid polypeptide is a cell-specific AAV capsid polypeptide.

[0080] In certain example embodiments, the cell-specific AAV capsid polypeptide is an engineered AAV1, AAV2, AAV3, AAV4, AAV5, AAV6, AAV7, AAV8, AAV9, AAV rh.74, or AAV rh.10 capsid polypeptide.

[0081] In certain example embodiments, the cell-specific capsid polynucleotide does not comprise splice regulatory elements.

[0082] In certain example embodiments, the vector further comprises a viral rep protein.

[0083] In certain example embodiments, the viral rep protein is an AAV viral rep protein.

[0084] In certain example embodiments, the viral rep protein is on the same vector as or a different vector from the cell-specific capsid polynucleotide.

[0085] In certain example embodiments, the viral rep protein is operatively coupled to a regulatory element.

[0086] Described in certain example embodiments herein are polypeptides that are produced by the vector system described herein.

[0087] Described in certain example embodiments herein are cells comprising the vector system or the polypeptide described herein.

[0088] In certain example embodiments, the cell is a prokaryotic.

[0089] In certain example embodiments, the cell is a eukaryotic cell.

[0090] Described in certain example embodiments herein are engineered virus particles comprising: a cell-specific capsid, wherein the cell-specific capsid is encoded by a cell-specific capsid polynucleotide of the vector system described herein.

[0091] In certain example embodiments, the engineered virus particle further comprises a cargo molecule, wherein the cargo molecule is encoded by a cargo polynucleotide of the vector system described herein.

[0092] In certain example embodiments, the cargo molecule is a gene modification molecule, a non-gene modification polypeptide, a non-gene modification RNA, or a combination thereof.

[0093] In certain example embodiments, the engineered virus particle is an engineered adeno-associated virus particle.

[0094] Described in certain example embodiments herein are engineered virus particles produced by the method comprising: expressing a vector system described herein in a cell.

[0095] Described in certain example embodiments herein are pharmaceutical formulations comprising: a vector system as described herein, a polypeptide as described herein, a cell as described herein, an engineered virus particle as described herein, or a combination thereof; and a pharmaceutically acceptable carrier.

[0096] Described in certain example embodiments herein are methods comprising administering a vector system as described herein, a polypeptide as described herein, a cell as described herein, an engineered virus particle as described herein, a pharmaceutical formulation as described herein, or a combination thereof to a subject.

[0097] These and other embodiments, objects, features, and advantages of the example embodiments will become apparent to those having ordinary skill in the art upon consideration of the following detailed description of illustrated example embodiments.

### BRIEF DESCRIPTION OF THE DRAWINGS

[0098] An understanding of the features and advantages of the present invention will be obtained by reference to the following detailed description that sets forth illustrative embodiments, in which the principles of the invention may be utilized, and the accompanying drawings of which:

[0099] FIG. 1 demonstrates the adeno-associated virus (AAV) transduction mechanism, which results in production of mRNA from the transgene.

[0100] FIG. 2 shows a graph that can demonstrate that mRNA-based selection of AAV variants can be more stringent than DNA-based selection. The virus library was expressed under the control of a CMV promoter.

[0101] FIGS. 3A-3B show graphs that can demonstrate a correlation between the virus library and vector genome DNA (FIG. 3A) and mRNA (FIG. 3B) in the liver.

[0102] FIGS. 4A-4F show graphs that can demonstrate capsid variants present at the DNA level, and expressed at the mRNA level identified in different tissues. For this experiment, the virus library was expressed under the control of a CMV promoter.

[0103] FIGS. 5A-5C show graphs that can demonstrate capsid mRNA expression in different tissues under the control of cell-type specific promoters (as noted on x-axis). CMV was included as an exemplary constitutive promoter. CK8 is a muscle-specific promoter. MHCK7 is a muscle-specific promoter. hSyn is a neuron specific promoter. Expression levels from the cell type-specific promoters have been normalized based on expression levels from the constitutive CMV promoter in each tissue.

[0104] FIG. 6 shows a schematic demonstrating embodiments of a method of producing and selecting capsid variants for tissue-specific gene delivery across species.

[0105] FIG. 7 shows a schematic demonstrating embodiments of generating an AAV capsid variant library, particularly insertion of a random n-mer (n=3-15 amino acids) into a wild-type AAV, e.g. AAV9.

[0106] FIG. 8 shows a schematic demonstrating embodiments of generating an AAV capsid variant library, particularly variant AAV particle production. Each capsid variant encapsulates its own coding sequence as the vector genome.

[0107] FIG. 9 shows schematic vector maps of representative AAV capsid plasmid library vectors (see e.g. FIG. 8) that can be used in an AAV vector system to generate an AAV capsid variant library.

[0108] FIG. 10 shows a graph that demonstrates the viral titer (calculated as AAV9 vector genome/15 cm dish) produced by constructs containing different constitutive and cell-type specific mammalian promoters.

[0109] FIGS. 11A-11C show graphs (FIGS. 11A and 11C) and schematic (FIG. 11B) that demonstrate the correlation between the amount of plasmid library vector used for virus library production and cross-packaging. FIG. 11A can demonstrate the effect of the plasmid library vector amount on virus titer. FIG. 11B can demonstrate the nucleotide sequence of the random n-mer (FIG. 11C shows by way of example a 7-mer) as inserted between the codon for aa588 and aa589 of wild-type AAV9. Each X indicates an amino acid. N indicates any nucleotide (G, A, T, C). K indicates that the nucleotide at that position is T or G. FIG. 11C can demonstrate the effect of the plasmid library vector amount on % reads containing a STOP codon.

[0110] FIGS. 12A-12F show graphs that demonstrate the results obtained after the first round of selection in C57BL/6 mice using a capsid library expressed under the control of the MHCK7 muscle-specific promoter.

[0111] FIGS. 13A-13D show graphs that demonstrate the results obtained after the second round of selection in C57BL/6 mice using a capsid library expressed under the control of the MHCK7 muscle-specific promoter.

[0112] FIGS. 14A-14B shows graphs that demonstrate a correlation between the abundance of variants encoded by synonymous codons.

[0113] FIG. 15 shows a graph that can demonstrate a correlation between the abundance of the same variants expressed under the control of two different muscle specific promoters (MHCK7 and CK8).

[0114] FIG. 16 shows a graph that can demonstrate muscle-tropic capsid variants that produce rAAV with similar titers to wild-type AAV9 capsid.

[0115] FIG. 17 shows images that can demonstrate a comparison of mouse tissue transduction between rAAV9-GFP and rMyoAAV-GFP.

[0116] FIG. 18 shows a panel of images that can demonstrate a comparison of mouse tissue transduction between rAAV9-GFP and rMyoAAV-G.

[0117] FIG. 19 shows a panel of images that can demonstrate a comparison of mouse tissue transduction between rAAV9-GFP and rMyoAAV-GF.

[0118] FIG. 20 shows a schematic of selection of potent capsid variants for muscle-directed gene delivery across species.

[0119] FIGS. 21A-21C show tables that can demonstrate selection in different strains of mice identifies the same variants as the top muscle-tropic hits.

[0120] The figures herein are for illustrative purposes only and are not necessarily drawn to scale.

### DETAILED DESCRIPTION OF THE EXAMPLE EMBODIMENTS

### General Definitions

[0121] Unless defined otherwise, technical and scientific terms used herein have the same meaning as commonly understood by one of ordinary skill in the art to which this disclosure pertains. Definitions of common terms and techniques in molecular biology may be found in Molecular Cloning: A Laboratory Manual, 2^{nd} edition (1989) (Sambrook, Fritsch, and Maniatis); Molecular Cloning: A Laboratory Manual, 4^{th} edition (2012) (Green and Sambrook); Current Protocols in Molecular Biology (1987) (F. M. Ausubel et al. eds.); the series Methods in Enzymology (Academic Press, Inc.): PCR 2: A Practical Approach (1995) (M. J. MacPherson, B. D. Hames, and G. R. Taylor eds.): Antibodies, A Laboratory Manual (1988) (Harlow and Lane, eds.): Antibodies A Laboratory Manual, 2^{nd} edition 2013 (E. A. Greenfield ed.); Animal Cell Culture (1987) (R. I. Freshney, ed.); Benjamin Lewin, Genes IX, published by Jones and Bartlett, 2008 (ISBN 0763752223); Kendrew et al. (eds.), The Encyclopedia of Molecular Biology, published by Blackwell Science Ltd., 1994 (ISBN 0632021829); Robert A. Meyers (ed.), Molecular Biology and Biotechnology: a Comprehensive Desk Reference, published by VCH Publishers, Inc., 1995 (ISBN 9780471185710); Singleton et al., Dictionary of Microbiology and Molecular Biology 2^{nd} ed., J. Wiley & Sons (New York, N.Y. 1994), March, Advanced Organic Chemistry Reactions, Mechanisms and Structure 4^{th} ed., John Wiley & Sons (New York, N.Y. 1992); and Marten H. Hofker and Jan van Deursen, Transgenic Mouse Methods and Protocols, 2^{nd} edition (2011)

[0122] As used herein, the singular forms “a”, “an”, and “the” include both singular and plural referents unless the context clearly dictates otherwise.

[0123] The term “optional” or “optionally” means that the subsequent described event, circumstance or substituent may or may not occur, and that the description includes instances where the event or circumstance occurs and instances where it does not.

[0124] The recitation of numerical ranges by endpoints includes all numbers and fractions subsumed within the respective ranges, as well as the recited endpoints. It will be further understood that the endpoints of each of the ranges are significant both in relation to the other endpoint, and independently of the other endpoint. It is also understood that there are a number of values disclosed herein, and that each value is also herein disclosed as “about” that particular value in addition to the value itself. For example, if the value “10” is disclosed, then “about 10” is also disclosed. Ranges can be expressed herein as from “about” one particular value, and/or to “about” another particular value. Similarly, when values are expressed as approximations, by use of the antecedent “about,” it will be understood that the particular value forms a further embodiment. For example, if the value “about 10” is disclosed, then “10” is also disclosed.

[0125] It is to be understood that such a range format is used for convenience and brevity, and thus, should be interpreted in a flexible manner to include not only the numerical values explicitly recited as the limits of the range, but also to include all the individual numerical values or sub-ranges encompassed within that range as if each numerical value and sub-range is explicitly recited. To illustrate, a numerical range of “about 0.1% to 5%” should be interpreted to include not only the explicitly recited values of about 0.1% to about 5%, but also include individual values (e.g., about 1%, about 2%, about 3%, and about 4%) and the sub-ranges (e.g., about 0.5% to about 1.1%; about 5% to about 2.4%; about 0.5% to about 3.2%, and about 0.5% to about 4.4%, and other possible sub-ranges) within the indicated range. Where a range is expressed, a further embodiment includes from the one particular value and/or to the other particular value.

[0126] Where a range of values is provided, it is understood that each intervening value, to the tenth of the unit of the lower limit unless the context clearly dictates otherwise, between the upper and lower limit of that range and any other stated or intervening value in that stated range, is encompassed within the disclosure. The upper and lower limits of these smaller ranges may independently be included in the smaller ranges and are also encompassed within the disclosure, subject to any specifically excluded limit in the stated range. Where the stated range includes one or both of the limits, ranges excluding either or both of those included limits are also included in the disclosure. For example, where the stated range includes one or both of the limits, ranges excluding either or both of those included limits are also included in the disclosure, e.g. the phrase “x to y” includes the range from ‘x’ to ‘y’ as well as the range greater than ‘x’ and less than ‘y’. The range can also be expressed as an upper limit, e.g. ‘about x, y, z, or less’ and should be interpreted to include the specific ranges of ‘about x’, ‘about y’, and ‘about z’ as well as the ranges of ‘less than x’, less than y′, and ‘less than z’. Likewise, the phrase ‘about x, y, z, or greater’ should be interpreted to include the specific ranges of ‘about x’, ‘about y’, and ‘about z’ as well as the ranges of ‘greater than x’, greater than y′, and ‘greater than z’. In addition, the phrase “about ‘x’ to ‘y’”, where ‘x’ and ‘y’ are numerical values, includes “about ‘x’ to about ‘y’”.

[0127] The terms “about” or “approximately” as used herein when referring to a measurable value such as a parameter, an amount, a temporal duration, and the like, are meant to encompass variations of and from the specified value, such as variations of +/−10% or less, +/−5% or less, +/−1% or less, and +/−0.1% or less of and from the specified value, insofar such variations are appropriate to perform in the disclosed invention. It is to be understood that the value to which the modifier “about” or “approximately” refers is itself also specifically, and preferably, disclosed. As used herein, the terms “about,” “approximate,” “at or about,” and “substantially” can mean that the amount or value in question can be the exact value or a value that provides equivalent results or effects as recited in the claims or taught herein. That is, it is understood that amounts, sizes, formulations, parameters, and other quantities and characteristics are not and need not be exact, but may be approximate and/or larger or smaller, as desired, reflecting tolerances, conversion factors, rounding off, measurement error and the like, and other factors known to those of skill in the art such that equivalent results or effects are obtained. In some circumstances, the value that provides equivalent results or effects cannot be reasonably determined. In general, an amount, size, formulation, parameter or other quantity or characteristic is “about,” “approximate,” or “at or about” whether or not expressly stated to be such. It is understood that where “about,” “approximate,” or “at or about” is used before a quantitative value, the parameter also includes the specific quantitative value itself, unless specifically stated otherwise.

[0128] As used herein, a “biological sample” may contain whole cells and/or live cells and/or cell debris. The biological sample may contain (or be derived from) a “bodily fluid”. The present invention encompasses embodiments wherein the bodily fluid is selected from amniotic fluid, aqueous humour, vitreous humour, bile, blood serum, breast milk, cerebrospinal fluid, cerumen (earwax), chyle, chyme, endolymph, perilymph, exudates, feces, female ejaculate, gastric acid, gastric juice, lymph, mucus (including nasal drainage and phlegm), pericardial fluid, peritoneal fluid, pleural fluid, pus, rheum, saliva, sebum (skin oil), semen, sputum, synovial fluid, sweat, tears, urine, vaginal secretion, vomit and mixtures of one or more thereof. Biological samples include cell cultures, bodily fluids, cell cultures from bodily fluids. Bodily fluids may be obtained from a mammal organism, for example by puncture, or other collecting or sampling procedures.

[0129] The terms “subject,” “individual,” and “patient” are used interchangeably herein to refer to a vertebrate, preferably a mammal, more preferably a human. Mammals include, but are not limited to, murines, simians, humans, farm animals, sport animals, and pets. Tissues, cells and their progeny of a biological entity obtained in vivo or cultured in vitro are also encompassed.

[0130] Various embodiments are described hereinafter. It should be noted that the specific embodiments are not intended as an exhaustive description or as a limitation to the broader embodiments discussed herein. One embodiment described in conjunction with a particular embodiment is not necessarily limited to that embodiment and can be practiced with any other embodiment(s). Reference throughout this specification to “one embodiment”, “an embodiment,” “an example embodiment,” means that a particular feature, structure or characteristic described in connection with the embodiment is included in at least one embodiment of the present invention. Thus, appearances of the phrases “in one embodiment,” “in an embodiment,” or “an example embodiment” in various places throughout this specification are not necessarily all referring to the same embodiment, but may. Furthermore, the particular features, structures or characteristics may be combined in any suitable manner, as would be apparent to a person skilled in the art from this disclosure, in one or more embodiments. Furthermore, while some embodiments described herein include some, but not other features included in other embodiments, combinations of features of different embodiments are meant to be within the scope of the invention. For example, in the appended claims, any of the claimed embodiments can be used in any combination.

[0131] All publications, published patent documents, and patent applications cited herein are hereby incorporated by reference to the same extent as though each individual publication, published patent document, or patent application was specifically and individually indicated as being incorporated by reference.

### Overview

[0132] Embodiments disclosed herein provide engineered adeno-associated virus (AAV) capsids that can be engineered to confer cell-specific and/or species-specific tropism to an engineered AAV particle.

[0133] Embodiments disclosed herein also provide methods of generating the rAAVs having engineered capsids that can involve systematically directing the generation of diverse libraries of variants of modified surface structures, such as variant capsid proteins. Embodiments of the method of generating rAAVs having engineered capsids can also include stringent selection of capsid variants capable of targeting a specific cell, tissue, and/or organ type. Embodiments of the method of generating rAA Vs having engineered capsids can include stringent selection of capsid variants capable of efficient and/or homogenous transduction in at least two or more species.

[0134] Embodiments disclosed herein provide vectors and systems thereof capable of producing an engineered AAV described herein.

[0135] Embodiments disclosed herein provide cells that can be capable of producing the engineered AAV particles described herein. In some embodiments, the cells include one or more vectors or system thereof described herein.

[0136] Embodiments disclosed herein provide engineered AAVs that can include an engineered capsid described herein. In some embodiments, the engineered AAV can include a cargo polynucleotide to be delivered to a cell. In some embodiments, the cargo polynucleotide is a gene modification polynucleotide.

[0137] Embodiments disclosed herein provide formulations that can contain an engineered AAV vector or system thereof, an engineered AAV capsid, engineered AAV particles including an engineered AAV capsid described herein, and/or an engineered cell described herein that contains an engineered AAV capsid, and/or an engineered AAV vector or system thereof. In some embodiments, the formulation can also include a pharmaceutically acceptable carrier. The formulations described herein can be delivered to a subject in need thereof or a cell.

[0138] Embodiments disclosed herein also provide kits that contain one or more of the one or more of the polypeptides, polynucleotides, vectors, engineered AAV capsids, engineered AAV particles, cells, or other components described herein and combinations thereof and pharmaceutical formulations described herein. In embodiments, one or more of the polypeptides, polynucleotides, vectors, engineered AAV capsids, engineered AAV particles cells, and combinations thereof described herein can be presented as a combination kit.

[0139] Embodiments disclosed herein provide methods of using the engineered AAVs having a cell-specific tropism described herein to deliver, for example, a therapeutic polynucleotide to a cell. In this way, the engineered AA Vs described herein can be used to treat and/or prevent a disease in a subject in need thereof. Embodiments disclosed herein also provide methods of delivering the engineered AAV capsids, engineered AAV virus particles, engineered AAV vectors or systems thereof and/or formulations thereof to a cell. Also provided herein are methods of treating a subject in need thereof by delivering an engineered AAV particle, engineered AAV capsid, engineered AAV capsid vector or system thereof, an engineered cell, and/or formulation thereof to the subject.

[0140] Additional features and advantages of the embodiments engineered AAVs and methods of making and using the engineered AAVs are further described herein.

### Engineered AAV Capsids and Encoding Polynucleotides

[0141] Described herein are various embodiments of engineered adeno-associated virus (AAV) capsids that can be engineered to confer cell-specific tropism to an engineered AAV particle. The engineered capsids can be included in an engineered virus particle, and can confer cell-specific tropism, reduced immunogenicity, or both to the engineered AAV particle. The engineered AAV capsids described herein can include one or more engineered AAV capsid proteins described herein.

[0142] The engineered AAV capsid and/or capsid proteins can be encoded by one or more engineered AAV capsid polynucleotides. In some embodiments, an engineered AAV capsid polynucleotide can include a 3′ polyadenylation signal. The polyadenylation signal can be an SV40 polyadenylation signal.

[0143] The engineered AAV capsids can be variants of wild-type AAV capsids. In some embodiments, the wild-type AAV capsids can be composed of VP1, VP2, VP3 capsid proteins or a combination thereof. In other words, the engineered AAV capsids can include one or more variants of a wild-type VP1, wild-type VP2, and/or wild-type VP3 capsid proteins. In some embodiments, the serotype of the reference wild-type AAV capsid can be AAV-1, AAV-2, AAV-3, AAV-4, AAV-5, AAV-6, AAV-8, AAV-9 or any combination thereof. In some embodiments, the serotype of the wild-type AAV capsid can be AAV-9. The engineered AAV capsids can have a different tropism than that of the reference wild-type AAV capsid.

[0144] The engineered AAV capsid can contain 1-60 engineered capsid proteins. In some embodiments, the engineered AAV capsids can contain 1, 2, 3, 4, 5, 6, 7, 8, 9, 10, 11, 12, 13, 14, 15, 16, 17, 18, 19, 20, 21, 22, 23, 24, 25, 26, 27, 28, 29, 30, 31, 32, 33, 34, 35, 36, 37, 38, 39, 40, 41, 42, 43, 44, 45, 46, 47, 48, 49, 50, 51, 52, 53, 54, 55, 56, 57, 58, 59, or 60 engineered capsid proteins. In some embodiments, the engineered AAV capsid can contain 0-59 wild-type AAV capsid proteins. In some embodiments, the engineered AAV capsid can contain 0, 1, 2, 3, 4, 5, 6, 7, 8, 9, 10, 11, 12, 13, 14, 15, 16, 17, 18, 19, 20, 21, 22, 23, 24, 25, 26, 27, 28, 29, 30, 31, 32, 33, 34, 35, 36, 37, 38, 39, 40, 41, 42, 43, 44, 45, 46, 47, 48, 49, 50, 51, 52, 53, 54, 55, 56, 57, 58, or 59 wild-type AAV capsid proteins.

[0145] In some embodiments, the engineered AAV capsid protein can have an n-mer amino acid motif, where n can be at least 3 amino acids. In some embodiments, n can be 3, 4, 5, 6, 7, 8, 9, 10, 11, 12, 13, 14, or 15 amino acids. In some embodiments, the engineered AAV capsid can have a 6-mer or 7-mer amino acid motif. In some embodiments, the n-mer amino acid motif can be inserted between two amino acids in the wild-type viral protein (VP) (or capsid protein). In some embodiments, the n-mer motif can be inserted between two amino acids in a variable amino acid region in an AAV capsid protein. The core of each wild-type AAV viral protein contains an eight-stranded beta-barrel motif (betaB to betaI) and an alpha-helix (alphaA) that are conserved in autonomous parvovirus capsids (see e.g. DiMattia et al. 2012. J. Virol. 86 (12): 6947-6958). Structural variable regions (VRs) occur in the surface loops that connect the beta-strands, which cluster to produce local variations in the capsid surface. AAVs have 12 variable regions (also referred to as hypervariable regions) (see e.g. Weitzman and Linden. 2011. “Adeno-Associated Virus Biology.” In Snyder, R. O., Moullier, P. (eds.) Totowa, NJ: Humana Press). In some embodiments, one or more n-mer motifs can be inserted between two amino acids in one or more of the 12 variable regions in the wild-type AVV capsid proteins. In some embodiments, the one or more n-mer motifs can be each be inserted between two amino acids in VR-I, VR-II, VR-III, VR-IV, VR-V, VR-VI, VR-VII, VR-III, VR-IX, VR-X, VR-XI, VR-XII, or a combination thereof. In some embodiments, the n-mer can be inserted between two amino acids in the VR-III of a capsid protein. In some embodiments, the engineered capsid can have an n-mer inserted between any two contiguous amino acids between amino acids 262 and 269, between any two contiguous amino acids between amino acids 327 and 332, between any two contiguous amino acids between amino acids 382 and 386, between any two contiguous amino acids between amino acids 452 and 460, between any two contiguous amino acids between amino acids 488 and 505, between any two contiguous amino acids between amino acids 545 and 558, between any two contiguous amino acids between amino acids 581 and 593, between any two contiguous amino acids between amino acids 704 and 714 of an AAV9 viral protein. In some embodiments, the engineered capsid can have an n-mer inserted between amino acids 588 and 589 of an AAV9 viral protein. In some embodiments, the engineered capsid can have a 7-mer motif inserted between amino acids 588 and 589 of an AAV9 viral protein. SEQ ID NO: 1 is a reference AAV9 capsid sequence for at least referencing the insertion sites discussed above. It will be appreciated that n-mers can be inserted in analogous positions in AAV viral proteins of other serotypes. In some embodiments as previously discussed, the n-mer(s) can be inserted between any two contiguous amino acids within the AAV viral protein and in some embodiments the insertion is made in a variable region.

AAV9 capsid reference Sequence.
SEQ ID NO: 1
MAADGYLPDWLEDNLSEGIREWWALKPGAPQPKANQQHQDNARGLVLPG
YKYLGPGNGLDKGEPVNAADAAALEHDKAYDQQLKAGDNPYLKYNHADA
EFQERLKEDTSFGGNLGRAVFQAKKRLLEPLGLVEEAAKTAPGKKRPVE
QSPQEPDSSAGIGKSGAQPAKKRLNFGQTGDTESVPDPQPIGEPPAAPS
GVGSLTMASGGGAPVADNNEGADGVGSSSGNWHCDSQWLGDRVITTSTR
TWALPTYNNHLYKQISNSTSGGSSNDNAYFGYSTPWGYFDFNRFHCHFS
PRDWQRLINNNWGFRPKRLNFKLFNIQVKEVTDNNGVKTIANNLTSTVQ
VFTDSDYQLPYVLGSAHEGCLPPFPADVFMIPQYGYLTLNDGSQAVGRS
SFYCLEYFPSQMLRTGNNFQFSYEFENVPFHSSYAHSQSLDRLMNPLID
QYLYYLSKTINGSGQNQQTLKFSVAGPSNMAVQGRNYIPGPSYRQQRVS
TTVTQNNNSEFAWPGASSWALNGRNSLMNPGPAMASHKEGEDRFFPLSG
SLIFGKQGTGRDNVDADKVMITNEEEIKTTNPVATESYGQVATNHQSAQ
AQAQTGWVQNQGILPGMVWQDRDVYLQGPIWAKIPHTDGNFHPSPLMGG
FGMKHPPPQILIKNTPVPADPPTAFNKDKLNSFITQYSTGQVSVEIEWE
LQKENSKRWNPEIQYTSNYYKSNNVEFAVNTEGVYSEPRPIGTRYLTRN
L

[0146] In some embodiments, the n-mer can be an amino acid can be any amino acid motif as shown in Tables 1-3. In some embodiments, insertion of the n-mer in an AAV capsid can result in cell, tissue, organ, specific engineered AAV capsids. In some embodiments, the engineered capsid can have a specificity for bone tissue and/or cells, lung tissue and/or cells, liver tissues and/or cells, bladder tissue and/or cells, kidney tissue and/or cells, cardiac tissue and/or cells, skeletal muscle tissue and/or cells, smooth muscle and/or cells, neuronal tissue and/or cells, intestinal tissue and/or cells, pancreases tissue and/or cells, adrenal gland tissue and/or cells, brain tissue and/or cells, tendon tissues or cells, skin tissues and/or cells, spleen tissue and/or cells, eye tissue and/or cells, blood cells, synovial fluid cells, immune cells (including specificity for particular types of immune cells), and combinations thereof.

[0147] In some embodiments, the n-mer motif can include an “RGD” motif. An “RGD” motif refers to the presence of the amino acids RGD as the first three amino acids of the n-mer motif. Thus, in some embodiments the n-mer can have a sequence of RGD or RGDXₙ, where n can be 3-15 amino acids and X, where each amino acid present can each be independently selected from the others and can be selected from the group of any amino acid. In some embodiments, the n-mer motif can be RGD (3-mer), RGDX₁ (4-mer), RGDX₁X₂ (5-mer) (SEQ ID NO: 2), RGDX₁X₂X₃ (6-mer) (SEQ ID NO: 3), RGDX₁X₂X₃X₄ (7 mer) (SEQ ID NO: 4), RGDX₁X₂X₃X₄X₅ (8 mer) (SEQ ID NO: 5), or RGDX₁X₂X₃X₄X₅X₆ (9-mer) (SEQ ID NO: 6), RGD₁X₂X₃X₄X₅X₆X₇ (10-mer) (SEQ ID NO: 7), RGD₁X₂X₃X₄X₅X₆X₇X₈ (11-mer) (SEQ ID NO: 8), RGDX₁X₂X₃X₄X₅X₆X₇X₈X₉ (12-mer) (SEQ ID NO: 9), RGDX₁X₂X₃X₄X₅X₆X₇X₈X₉X₁₀ (13-mer) (SEQ ID NO: 10), RGDX₁X₂X₃X₄X₅X₆X₇X₈X₉X₁₀X₁₁ (14-mer) (SEQ ID NO: 11), or RGDX₁X₂X₃X₄X₅X₆X₇X₈X₉X₁₀X₁₁X₁₂ (15-mer) (SEQ ID NO: 12), where X₁, X₂, X₃, X₄, X₅, X₆, X₇, X₈, X₉, X₁₀, X₁₁, X₁₂ can each be independently selected and can be any amino acid. In some embodiments, X₁ can be L, T, A, M, V, Q, or M. In some embodiments, X₂ can be T, M, S, N, L, A, or I. In some embodiments, X₃ can be T, E, N, O, S, Q, Y, A, or D. In some embodiments, X₄ can be P, Y, K, L, H, T, or S. In some embodiments, n-mers including the RGD motif can be included in a muscle-specific engineered AAV capsids. In some embodiments, the n-mer motif can be in any one of Tables 4-6. In some embodiments, the n-mer in any of Tables 4-6 can be included in a muscle specific engineered capsid.

TABLE 1
CK8 Results mRNA Second Round of Capsid Variant
Selection in C57BL6 mice-score capped at 100

| | | | | | Sum of |
|---|---|---|---|---|---|
| | | | | | muscle mRNA |
| Variant | | SEQ ID | Amino Acid | SEQ ID | score_capped |
| ID | Nucleotide Sequence | NO: | Sequence | NO: | at 100 |
| 1 | AGGGGTGATCTTTCTACGCCT | 60 | RGDLSTP | 1277 | 715.366 |
| 2 | AGGGGCGACCTGAACCAATAC | 61 | RGDLNQY | 1278 | 712.149 |
| 3 | CGGGGTGATCTTACTACGCCT | 62 | RGDLTTP | 1279 | 461.536 |
| 4 | AGGGGGGATGCGACGGAGCTT | 63 | RGDATEL | 1280 | 452.77 |
| 5 | CGGGGTGATCAGCTTTATCAT | 64 | RGDQLYH | 1281 | 444.505 |
| 6 | AGAGGCGACTTATCCACACCC | 65 | RGDLSTP | 1282 | 411.692 |
| 7 | CGTGGTGATGTGGCGGCTAAG | 66 | RGDVAAK | 1283 | 371.7 |
| 8 | AGAGGAGACTTGACAACCCCA | 67 | RGDLTTP | 1284 | 361.486 |
| 9 | CGGGGTGATCTTAATCAGTAT | 68 | RGDLNQY | 1285 | 342.712 |
| 10 | CGAGGAGACACCATGAGCAAA | 69 | RGDTMSK | 1286 | 325.632 |
| 11 | CGCGGAGACGTAGCCGCCAAA | 70 | RGDVAAK | 1287 | 315.01 |
| 12 | CGGGGGGATACTATGTCTAAG | 71 | RGDTMSK | 1288 | 309.567 |
| 13 | CGGGGTGACGCAACAGAATTG | 72 | RGDATEL | 1289 | 306.99 |
| 14 | GCACGGTCAAACGACTCGGTC | 73 | ARSNDSV | 1290 | 293.22 |
| 15 | CGGGGTGACATGAACAACTCA | 74 | RGDMNNS | 1291 | 268.677 |
| 16 | ACGATGGGTGCTAATGGTACT | 75 | TMGANGT | 1292 | 260.853 |
| 17 | CCTAATGTTACGCAGTCTTAT | 76 | PNVTQSY | 1293 | 259.718 |
| 18 | CGTTTGGACCTGCAAGTCCAC | 77 | RLDLQVH | 1294 | 257.65 |
| 19 | GGGCTTTCTAAGGCGTCTGAT | 78 | GLSKASD | 1295 | 255.938 |
| 20 | GATCCTGGTCGGACGGGTACG | 79 | DPGRTGT | 1296 | 253.325 |
| 21 | TATCGGGGTAGGGAGGATTGG | 80 | YRGREDW | 1297 | 244.83 |
| 22 | AGATACGGAGAATCCATCGAA | 81 | RYGESIE | 1298 | 231.696 |
| 23 | AGTCTGAACAACATGGGATCG | 82 | SLNNMGS | 1299 | 229.6044 |
| 24 | AATAGTGATCAGCGGAATTGG | 83 | NSDQRNW | 1300 | 229.031 |
| 25 | CGTGGTGATATGTCTCGTGAG | 84 | RGDMSRE | 1301 | 227.081 |
| 26 | ATGACTGATGCGAATAGGATT | 85 | MTDANRI | 1302 | 226.194 |
| 27 | GTCTACAACGGCAACGTAGTA | 86 | VYNGNVV | 1303 | 223.663 |
| 28 | CGTGGGGATATGATTAATACG | 87 | RGDMINT | 1304 | 223.46 |
| 29 | AGTGGTCTTTCGCATGGTCAG | 88 | SGLSHGQ | 1305 | 221.726 |
| 30 | ACTGGCCAATTAGTAGGAACC | 89 | TGQLVGT | 1306 | 221.181 |
| 31 | GCTAATTCTATTGGGGGTCCG | 90 | ANSIGGP | 1307 | 220.304 |
| 32 | TACAGTCAATCGCTGTCTGAA | 91 | YSQSLSE | 1308 | 220.02 |
| 33 | TATCATAAGTATAGTACGGAT | 92 | YHKYSTD | 1309 | 217.64 |
| 34 | GCTCGTCATGATGAGCATGTG | 93 | ARHDEHV | 1310 | 217 |
| 35 | GCCATAGACTCTATCAAACAA | 94 | AIDSIKQ | 1311 | 216.071 |
| 36 | CGTTTGGACCTGCAAGTCAAC | 95 | RLDLQVN | 1312 | 215 |
| 37 | CGCGGCGACATGATAAACACC | 96 | RGDMINT | 1313 | 214.271 |
| 38 | AGTGTGTTGTCTCAGGCTAAT | 97 | SVLSQAN | 1314 | 213.907 |
| 39 | TTTACGGTGAATCAGGATCTT | 98 | FTVNQDL | 1315 | 213.78 |
| 40 | ACGGATAATGGTCTTCTTGTG | 99 | TDNGLLV | 1316 | 211.787 |
| 41 | TATCAGCAGACTTCTAGTACG | 100 | YQQTSST | 1317 | 211.386 |
| 42 | ACAGAACAATCTTACTCACGA | 101 | TEQSYSR | 1318 | 210.762 |
| 43 | ATTATGGGGCTTAGTCAGGCT | 102 | IMGLSQA | 1319 | 208.157 |
| 44 | GCTACTGCGCATCAGGATGGT | 103 | ATAHQDG | 1320 | 207.212 |
| 45 | TATAATGCTACTCCTTCGCAG | 104 | YNATPSQ | 1321 | 206.964 |
| 46 | TATACGCAGGGTATTATGAAT | 105 | YTQGIMN | 1322 | 206.672 |
| 47 | GAATCCCTCCCAATCTCTAAA | 106 | ESLPISK | 1323 | 206.576 |
| 48 | GGCACCGTCGTTCCGGGCTCC | 107 | GTVVPGS | 1324 | 206.111 |
| 49 | GGATTAGCTAGTCTACACCTG | 108 | GLASLHL | 1325 | 204.394 |
| 50 | TATATTGCTGCGGGTGAGCAG | 109 | YIAAGEQ | 1326 | 204.24 |
| 51 | AACACCTACCCCTTCAACGCC | 110 | NTYPFNA | 1327 | 203.931 |
| 52 | GTTGGTGCGAGTACGGCTTCG | 111 | VGASTAS | 1328 | 202.92 |
| 53 | GGATCCAACTACTTAGCAAAC | 112 | GSNYLAN | 1329 | 202.857 |
| 54 | GATACTGGTCGGACGGGTACG | 113 | DTGRTGT | 1330 | 202.83 |
| 55 | AAGCCGAATACGATGAGTGAT | 114 | KPNTMSD | 1331 | 202.7282 |
| 56 | GTAGACAAATCTAGCCCAGTG | 115 | VDKSSPV | 1332 | 201.849 |
| 57 | AGTTCGGACCCAAAAGGTCAA | 116 | SSDPKGQ | 1333 | 201.825 |
| 58 | TGGCAGACGAATGGTATGCAG | 117 | WQTNGMQ | 1334 | 201.6943 |
| 59 | ACCGGTAGCTTGAACTCTATG | 118 | TGSLNSM | 1335 | 201.671 |
| 60 | CATTCTAATTCGAGTCAGAAT | 119 | HSNSSQN | 1336 | 200.954 |
| 61 | GGCCGTGACGACCTCACAAAC | 120 | GRDDLTN | 1337 | 200.911 |
| 62 | GATACTTATAAGGGTAAGTGG | 121 | DTYKGKW | 1338 | 200.7787 |
| 63 | TATACGGCGCAGACCGGCTGG | 122 | YTAQTGW | 1339 | 200 |
| 64 | AATCAGGTGGGTGCGTCTGCG | 123 | NQVGASA | 1340 | 200 |
| 65 | ATCGACGTACTGAACGGAAGT | 124 | IDVLNGS | 1341 | 200 |
| 66 | TTTCGGACGGTGTATACTGGT | 125 | FRTVYTG | 1342 | 200 |
| 67 | GGAAACATGGTGACTCCAAAC | 126 | GNMVTPN | 1343 | 200 |
| 68 | GATACTTATAAGGGTAAGTGG | 127 | DTYNGKW | 1344 | 200 |
| 69 | ACCATCCAAGACCACATAAAA | 128 | TIQDHIK | 1345 | 200 |
| 70 | GGAGCAAAAGGAACCATGGGC | 129 | GAKGTMG | 1346 | 200 |
| 71 | ACGAGGAGCAACTCCGACGAA | 130 | TRSNSDE | 1347 | 200 |
| 72 | GCTACTACTCTTACTGGTGAT | 131 | ATTLTGD | 1348 | 200 |
| 73 | TCATACGGAGGATCTGGCCCC | 132 | SYGGSGP | 1349 | 198.715 |
| 74 | GAAAAATCCGTCGAATCCAAA | 133 | EKSVESK | 1350 | 196.418 |
| 75 | CGAGGCGACACAATGAACTAC | 134 | RGDTMNY | 1351 | 195.3082 |
| 76 | CGGGATCTGGGGCAGACCGGC | 135 | RDLGQTG | 1352 | 194.34 |
| 77 | AGTCCGCAGCTGAGTGTGATG | 136 | SPQLSVM | 1353 | 194.21 |
| 78 | CGAGGAGACAACAGCACACCG | 137 | RGDNSTP | 1354 | 193.05 |
| 79 | CCTATGGCAGGACACCCCCCG | 138 | PMAGHPP | 1355 | 192.726 |
| 80 | ACGGCGTATCAGGCTGGTCTG | 139 | TAYQAGL | 1356 | 191.778 |
| 81 | GTGGTAAACCAAGGAAACCAA | 140 | WNQGNQ | 1357 | 191.737 |
| 82 | GATAAGACTGAGATGCTGCAG | 141 | DKTEMLQ | 1358 | 191.13 |
| 83 | ACTGTGATGATGAGTACGAGG | 142 | TVMMSTR | 1359 | 191.063 |
| 84 | CAGCAGAATACGCGTTTGCCG | 143 | QQNTRLP | 1360 | 190.1825 |
| 85 | TACCAACACAACCAAGCCCAC | 144 | YQHNQAH | 1361 | 189.595 |
| 86 | AATCAGAGTATTAATAATATT | 145 | NQSINNI | 1362 | 188.654 |
| 87 | CGAGGAGACCACAGCACACCG | 146 | RGDHSTP | 1363 | 187.365 |
| 88 | GACTCTACACTTCACTTAAGT | 147 | DSTLHLS | 1364 | 187.36 |
| 89 | GCGAACATAGAAAACACGTCA | 148 | ANIENTS | 1365 | 187.03 |
| 90 | ACAAACGCTGCTCTAGTACCA | 149 | TNAALVP | 1366 | 185.9743 |
| 91 | GGGCAGAAGGAGACTACTGCG | 150 | GQKETTA | 1367 | 184.457 |
| 92 | GAACTTAACACCGCACACGCA | 151 | ELNTAHA | 1368 | 184.059 |
| 93 | GGTGTTAGTAGTAATTCTGCG | 152 | GVSSNSA | 1369 | 183.964 |
| 94 | AGCACAAACGCGGGACAAAGG | 153 | STNAGQR | 1370 | 183.571 |
| 95 | GAACAACAAAAAACAGACAAC | 154 | EQQKTDN | 1371 | 182.331 |
| 96 | GCTGTTGTGAATGAGAATATG | 155 | AWNENM | 1372 | 182.3 |
| 97 | GGCAGCGTCAGCACCAGCGCA | 156 | GSVSTSA | 1373 | 181.451 |
| 98 | GAGTTGGGTAGTCAGCGTATG | 157 | ELGSQRM | 1374 | 181.36 |
| 99 | AGAGGCGACTTATCCACACAC | 158 | RGDLSTH | 1375 | 181.15 |
| 100 | GACCACCAACAAGCCCTAGCT | 159 | DHQQALA | 1376 | 180.295 |
| 101 | AACAGATCTGACGCTCACGAA | 160 | NRSDAHE | 1377 | 180.265 |
| 102 | AATGTTAATGCGCAGAGTAGG | 161 | NVNAQSR | 1378 | 179.918 |
| 103 | ACCCAAGGGAACAACATGGTA | 162 | TQGNNMV | 1379 | 179.575 |
| 104 | ACGGCGCTGAATACGTATCCT | 163 | TALNTYP | 1380 | 179.568 |
| 105 | GTCTCTACATACCTCCTGGCA | 164 | VSTYLLA | 1381 | 179.172 |
| 106 | GGCGGCAACTACAACACAACT | 165 | GGNYNTT | 1382 | 178.62 |
| 107 | AGTAATATTAAGCCGGAGATT | 166 | SNIKPEI | 1383 | 178.567 |
| 108 | CCGAGGGTGCATGGTCAGGTT | 167 | PRVHGQV | 1384 | 178.479 |
| 109 | TCTAATTCTAATACTGCTGCT | 168 | SNSNTAA | 1385 | 178.119 |
| 110 | CTTGAGGTGGCGACGAGTCCG | 169 | LEVATSP | 1386 | 177.75 |
| 111 | CACGACGCCGACAAATTAGCT | 170 | HDADKLA | 1387 | 177.05 |
| 112 | GGTGTGTATATTGATGGTCGG | 171 | GVYIDGR | 1388 | 176.229 |
| 113 | TCGATGCAGTCGTATACGATG | 172 | SMQSYTM | 1389 | 175.538 |
| 114 | TCTAAAGGAAACGAACAAATG | 173 | SKGNEQM | 1390 | 175.311 |
| 115 | GGTCGGGATTATGCTATGAGT | 174 | GRDYAMS | 1391 | 174.17 |
| 116 | ACTGATGGTATTTTTCAGCCT | 175 | TDGIFQP | 1392 | 174.014 |
| 117 | GGGAGCCCAGTGATAGTAAAC | 176 | GSPVIVN | 1393 | 173.652 |
| 118 | ACATTAACAGACGTTCACCGA | 177 | TLTDVHR | 1394 | 172.837 |
| 119 | AAAAGCGAAGTACCCGCCCGA | 178 | KSEVPAR | 1395 | 172.72 |
| 120 | GTCAACACTGGCGCACTCTTG | 179 | VNTGALL | 1396 | 172.648 |
| 121 | AGTCAGCAGGGTTTTACTCTG | 180 | SQQGFTL | 1397 | 172.124 |
| 122 | AATAATAAGTCTGTGCCGGAT | 181 | NNKSVPD | 1398 | 172.0753 |
| 123 | AGTGTGATGGTGGGTACGAAT | 182 | SVMVGTN | 1399 | 171.86 |
| 124 | CGAAACGAAAACACTTACAAC | 183 | RNENTYN | 1400 | 170.674 |
| 125 | CAAGCTAACTTATCAATAATC | 184 | QANLSII | 1401 | 170.5862 |
| 126 | CCCGGACGGGACAGCAGAACG | 185 | PGRDSRT | 1402 | 169.875 |
| 127 | TTTCCGGCTAATGGTGGTGCT | 186 | FPANGGA | 1403 | 169.639 |
| 128 | GCTGGTAAGGATCTTAGTAAT | 187 | AGKDLSN | 1404 | 169.592 |
| 129 | GCACAATTCGAATCAGGCCGA | 188 | AQFESGR | 1405 | 169.281 |
| 130 | GGATACGGCAGTTACAGCAAC | 189 | GYGSYSN | 1406 | 169.247 |
| 131 | ACAATCGTTTCCGCTTACGCC | 190 | TIVSAYA | 1407 | 168.87 |
| 132 | AATGTGAGTCCTAATTTGACT | 191 | NVSPNLT | 1408 | 168.739 |
| 133 | AGAGGCGACTTATCAACACCC | 192 | RGDLSTP | 1409 | 167.66 |
| 134 | TTCTTAGAAGGAGTCGCTCAA | 193 | FLEGVAQ | 1410 | 167.647 |
| 135 | GGCTCCGAACGAGGAGAACGA | 194 | GSERGER | 1411 | 167.585 |
| 136 | TTGAATGTTGGTTCGAGTCTT | 195 | LNVGSSL | 1412 | 167.104 |
| 137 | CGTATTGTGGCTAATGAGCAG | 196 | RIVANEQ | 1413 | 166.96 |
| 138 | CAATCTATCGGCCACCCCGTT | 197 | QSIGHPV | 1414 | 166.7759 |
| 139 | GGTGGTATGTCGGCGCATTCG | 198 | GGMSAHS | 1415 | 166.775 |
| 140 | CATTCTACGACGTCTATGACG | 199 | HSTTSMT | 1416 | 166.711 |
| 141 | ACTGTAAACGGTACGAACGTA | 200 | TVNGTNV | 1417 | 166.64 |
| 142 | CTTGCGCCTGATAATATTGGG | 201 | LAPDNIG | 1418 | 166.005 |
| 143 | CAAACAGCGACTCTCGTGGCA | 202 | QTATLVA | 1419 | 165.921 |
| 144 | GCATCAGCACCGTCTGAATTC | 203 | ASAPSEF | 1420 | 165.64 |
| 145 | TCGATGGAGGGTCAGCAGCAT | 204 | SMEGQQH | 1421 | 165.62 |
| 146 | CAAGACGTAGGACGCACGAAC | 205 | QDVGRTN | 1422 | 164.147 |
| 147 | GTCTACAACGGCAACGAAGTA | 206 | VYNGNEV | 1423 | 164.11 |
| 148 | GCACAGGCGCAGACAGGCTGG | 207 | AQAQTGW | 1424 | 163.93 |
| 149 | CGGCTGGATCTGACGCATACG | 208 | RLDLTHT | 1425 | 163.75 |
| 150 | GCTGCACACGGCCGCGAACAA | 209 | AAHGREQ | 1426 | 163.577 |
| 151 | AGAGGCGACTTATACACACCC | 210 | RGDLYTP | 1427 | 163.43 |
| 152 | GGTATGCAGCAGAGGGAGAAG | 211 | GMQQREK | 1428 | 163.075 |
| 153 | CAGACTCAGGCGAGTACTAAT | 212 | QTQASTN | 1429 | 161.336 |
| 154 | CGGGACACCAACGCCCTCGGA | 213 | RDTNALG | 1430 | 161.225 |
| 155 | TCGAGTCAGATTTCTAATAGT | 214 | SSQISNS | 1431 | 161.063 |
| 156 | CAGTCGGTTAATAGTACGAGT | 215 | QSVNSTS | 1432 | 160.873 |
| 157 | GCTCTGGAGAGGGCTCAGTAT | 216 | ALERAQY | 1433 | 160.837 |
| 158 | CATACTGGGCATAGTTCTGTG | 217 | HTGHSSV | 1434 | 160.068 |
| 159 | CGGGGAGACATGACCCGAGCA | 218 | RGDMTRA | 1435 | 159.605 |
| 160 | TTTCAGCGTGATCTTGGGCAT | 219 | FQRDLGH | 1436 | 159.442 |
| 161 | ACAACCGGCGACATAATACGC | 220 | TTGDIIR | 1437 | 159.11 |
| 162 | TCTTTTCAGACGGATCGTGCG | 221 | SFQTDRA | 1438 | 159.04 |
| 163 | CAATCCAGCGACGGCCGAGTG | 222 | QSSDGRV | 1439 | 158.634 |
| 164 | ACTTCTGGGGCTTTGACCCGG | 223 | TSGALTR | 1440 | 158.32 |
| 165 | AATTCGAATACTGTGAATACG | 224 | NSNTVNT | 1441 | 157.71 |
| 166 | ATCTCCGGTAGTAGCAGTCTA | 225 | ISGSSSL | 1442 | 157.64 |
| 167 | AACGACAAATCAACCAACGTA | 226 | NDKSTNV | 1443 | 157.594 |
| 168 | ATCGTACTTGCTCCCACATCG | 227 | IVLAPTS | 1444 | 157.48 |
| 169 | TCAGGCGTCAACTACGGTGTC | 228 | SGVNYGV | 1445 | 157.321 |
| 170 | GTCGGCGCCCAACGGGACCCC | 229 | VGAQRDP | 1446 | 157.055 |
| 171 | ACGGGTATGAATAGTAATAAG | 230 | TGMNSNK | 1447 | 156.85 |
| 172 | ATCGAAGCCTACTCACGAGAC | 231 | IEAYSRD | 1448 | 156.774 |
| 173 | TTACACACAACACTAATGCCC | 232 | LHTTLMP | 1449 | 156.364 |
| 174 | TCTGATAATCATCTGAAGACT | 233 | SDNHLKT | 1450 | 156.334 |
| 175 | CGAAACGAAGACAAAGGAGGA | 234 | RNEDKGG | 1451 | 156.027 |
| 176 | ACGAAGGGTGCTAATGGTACT | 235 | TKGANGT | 1452 | 155.56 |
| 177 | GTCTACAACGGCAACGTAGAA | 236 | VYNGNVE | 1453 | 155.56 |
| 178 | TCAAACAGCGGAGGCAACCAC | 237 | SNSGGNH | 1454 | 155.294 |
| 179 | GTAGCCGCGGGACCAGAAGCG | 238 | VAAGPEA | 1455 | 154.25 |
| 180 | ACGTCTCTTAGTGGTAGTGCG | 239 | TSLSGSA | 1456 | 153.988 |
| 181 | GTTGGGCTGCAGAGTAATACT | 240 | VGLQSNT | 1457 | 153.453 |
| 182 | CACACCGCCCACAGCGTGGAC | 241 | HTAHSVD | 1458 | 153.3866 |
| 183 | AACGTGGGAATGAGCTCAACC | 242 | NVGMSST | 1459 | 153.212 |
| 184 | CATGCGGATGTGAATGCTGGG | 243 | HADVNAG | 1460 | 153.21 |
| 185 | AAAGCGGGACAACTAGTGGAA | 244 | KAGQLVE | 1461 | 153.178 |
| 186 | AGTACTTTTAGTGTGCTGCCT | 245 | STFSVLP | 1462 | 153.09 |
| 187 | CCTCAGTCTCCGAGTCGGGTT | 246 | PQSPSRV | 1463 | 152.823 |
| 188 | CACACCGCCACCCTTAGCAGC | 247 | HTATLSS | 1464 | 152.8 |
| 189 | CTTCCGCGTCATGATCAGTAT | 248 | LPRHDQY | 1465 | 152.412 |
| 190 | CAAGTGAACAACCCACTCACA | 249 | QVNNPLT | 1466 | 151.574 |
| 191 | ACAACAGAAACCGCACGAGGT | 250 | TTETARG | 1467 | 151.4255 |
| 192 | GTTCATGGGACGTTGACTTAT | 251 | VHGTLTY | 1468 | 150.654 |
| 193 | TATAGTACTGATCTTAGGATG | 252 | YSTDLRM | 1469 | 150.626 |
| 194 | GCACACGCTACCTCAAGCACT | 253 | AHATSST | 1470 | 150.587 |
| 195 | AGGGAGAGTGCTGCTCTGGCG | 254 | RESAALA | 1471 | 150.506 |
| 196 | AAGGATACTAATCAGCAGATT | 255 | KDTNQQI | 1472 | 150.189 |
| 197 | AGTATGCAATCATACACCATG | 256 | SMQSYTM | 1473 | 148.994 |
| 198 | ACAGCCTACTCGCCCACAGTC | 257 | TAYSPTV | 1474 | 148.946 |
| 199 | GAATCTGCCCACCAAAGAATA | 258 | ESAHQRI | 1475 | 148.867 |
| 200 | AGATACACAACAGCACAACAA | 259 | RYTTAQQ | 1476 | 148.802 |
| 201 | ACGTCTGTGGCGAATGTGAGT | 260 | TSVANVS | 1477 | 148.731 |
| 202 | AGGGATCAGCATACTTCTATT | 261 | RDQHTSI | 1478 | 148.687 |
| 203 | TCTGTTACGTCTTCTGGTCCG | 262 | SVTSSGP | 1479 | 148.574 |
| 204 | GCGGTTGTTCTGAATAGTAAT | 263 | AVVLNSN | 1480 | 148.476 |
| 205 | CCTGGGAATCCGTCTAGTAAT | 264 | PGNPSSN | 1481 | 147.792 |
| 206 | ACGGGGTCTACTACTCAGCTT | 265 | TGSTTQL | 1482 | 147.767 |
| 207 | GCTAATGAGCATAATGTGGGT | 266 | ANEHNVG | 1483 | 147.569 |
| 208 | ATGCAAAGAGAAGCAGCCAAC | 267 | MQREAAN | 1484 | 147.562 |
| 209 | TTAACCGACACAAACACCCGG | 268 | LTDTNTR | 1485 | 147.306 |
| 210 | CGAATGACCGAAATATCATAC | 269 | RMTEISY | 1486 | 146.933 |
| 211 | AAAGTGGACATGACCTCCAAA | 270 | KVDMTSK | 1487 | 146.392 |
| 212 | AGAGGAGACTTATCCACACCC | 271 | RGDLSTP | 1488 | 146.3 |
| 213 | CAAGCAAAAGCTAGCACAACT | 272 | QAKASTT | 1489 | 146.214 |
| 214 | CTACCCTCAACAGAAACTTTG | 273 | LPSTETL | 1490 | 145.892 |
| 215 | AGTAGTGCGCTTAATGCGTAT | 274 | SSALNAY | 1491 | 145.667 |
| 216 | TCGTCTGATCCTAAGGGGCAG | 275 | SSDPKGQ | 1492 | 145.644 |
| 217 | TTAGACGTGACGAGAATGAGA | 276 | LDVTRMR | 1493 | 145.51 |
| 218 | GCGGATGGTGGTGATAAGGGG | 277 | ADGGDKG | 1494 | 145.45 |
| 219 | ATGCTGTCTCAGGTTACGTTG | 278 | MLSQVTL | 1495 | 145.32 |
| 220 | AGTGTTAGTTCTGTGGTGTTG | 279 | SVSSWL | 1496 | 145.202 |
| 221 | ACCGAATCGCAAACCATGAGG | 280 | TESQTMR | 1497 | 145.0149 |
| 222 | TTCGGATCCCAAGAAAAACTC | 281 | FGSQEKL | 1498 | 144.467 |
| 223 | ACAGCCGGCGGCGAACGCGCC | 282 | TAGGERA | 1499 | 144.445 |
| 224 | GATCATAGTAAGCAGAGTTCG | 283 | DHSKQSS | 1500 | 144.0179 |
| 225 | ATTGATAGTACTTGGAATACG | 284 | IDSTWNT | 1501 | 143.92 |
| 226 | TCGCCTCGCCCCGAACTCCGA | 285 | SPRPELR | 1502 | 143.362 |
| 227 | AGTATTGCGACTGCTACTAGT | 286 | SIATATS | 1503 | 143.312 |
| 228 | GTAATAGGCGGACACGGGACT | 287 | VIGGHGT | 1504 | 143.136 |
| 229 | AGCACCGCCATGTACCCCCAC | 288 | STAMYPH | 1505 | 142.798 |
| 230 | CGGGACTTGAGACCCGTGACG | 289 | RDLRPVT | 1506 | 142.461 |
| 231 | GCTCATCTGACTGATCTTCCG | 290 | AHLTDLP | 1507 | 142.37 |
| 232 | TTTCTGAATAGTACGCAGCTT | 291 | FLNSTQL | 1508 | 142.276 |
| 233 | TTAAACAACAGTGCCACAGTC | 292 | LNNSATV | 1509 | 142.021 |
| 234 | GATCGTCCGAATAATATGACG | 293 | DRPNNMT | 1510 | 141.945 |
| 235 | TCATCGTCAGACTCACCCAGA | 294 | SSSDSPR | 1511 | 141.849 |
| 236 | CGCTTGGACGTTGGAAGCCCG | 295 | RLDVGSP | 1512 | 141.82 |
| 237 | GCGCAGCAGAGTCTTCATGGT | 296 | AQQSLHG | 1513 | 141.401 |
| 238 | ATGGGGAAGCATGAGGGTCTT | 297 | MGKHEGL | 1514 | 141.2916 |
| 239 | GAGAATGCTCGTGAGGGTGTG | 298 | ENAREGV | 1515 | 140.87 |
| 240 | ACCGTATCTCTCTCGGAAGGC | 299 | TVSLSEG | 1516 | 140.529 |
| 241 | CTTAACACACTAATCGACCGG | 300 | LNTLIDR | 1517 | 140.256 |
| 242 | GAACTCTCCGTTCCGAAACCA | 301 | ELSVPKP | 1518 | 140.203 |
| 243 | AAAGACAAAAACGTATACATA | 302 | KDKNVYI | 1519 | 140.171 |
| 244 | AATGCGAATGGGCCTGTGAGT | 303 | NANGPVS | 1520 | 140.158 |
| 245 | CTTACTACGAATGGTATGCTG | 304 | LTTNGML | 1521 | 140.147 |
| 246 | GCCGGCGAATCTTCACCCACA | 305 | AGESSPT | 1522 | 139.95 |
| 247 | AGTGGGATTGGTACTTATTCT | 306 | SGIGTYS | 1523 | 139.76 |
| 248 | GTCAGATCTATGGACGAATTG | 307 | VRSMDEL | 1524 | 139.74 |
| 249 | ATGAACACCGGCTCTTCGAGT | 308 | MNTGSSS | 1525 | 139.328 |
| 250 | GGGGTGACTGTTAGGGAGCTT | 309 | GVTVREL | 1526 | 139.099 |
| 251 | CAGATTTTGAATTATAGTGTG | 310 | QILNYSV | 1527 | 138.991 |
| 252 | ATGGCGGGTGAGTATAGGGTT | 311 | MAGEYRV | 1528 | 138.933 |
| 253 | TGGTCGCATGATCGGCCTACT | 312 | WSHDRPT | 1529 | 138.703 |
| 254 | TGCAAAAACAACTCAGAATGC | 313 | CKNNSEC | 1530 | 138.668 |
| 255 | TTGACGACGAATAGTCATTAT | 314 | LTTNSHY | 1531 | 138.525 |
| 256 | ATGCTTGTTCAGAATACTCCT | 315 | MLVQNTP | 1532 | 138.3 |
| 257 | CGTGGTGCGACTGAGCATGCG | 316 | RGATEHA | 1533 | 138.186 |
| 258 | GCTTCGAATGGGAGTATGGGT | 317 | ASNGSMG | 1534 | 138.1181 |
| 259 | AATAGTTATACTGCTGGGAAG | 318 | NSYTAGK | 1535 | 137.4033 |
| 260 | TCCACCCAAGGAGCCATCCTC | 319 | STQGAIL | 1536 | 137.294 |
| 261 | TGGAATACGAATATGGCGATT | 320 | WNTNMAI | 1537 | 137.17 |
| 262 | GTCTCATCGTACGAAAAAATA | 321 | VSSYEKI | 1538 | 137.055 |
| 263 | GTGCTGAGTACGGGGCAGCGG | 322 | VLSTGQR | 1539 | 136.9001 |
| 264 | CCTATACCCCACGGTTCATCC | 323 | PIPHGSS | 1540 | 136.523 |
| 265 | AACGTGTCACTAACGCAAACG | 324 | NVSLTQT | 1541 | 136.4003 |
| 266 | TCTACCATCGGCAACAGCACG | 325 | STIGNST | 1542 | 136.393 |
| 267 | TCTGAGAAGCTGACTGATAAG | 326 | SEKLTDK | 1543 | 136.36 |
| 268 | TCCAAAGACTCGAACATAAGT | 327 | SKDSNIS | 1544 | 136.166 |
| 269 | GCGAATAGTAATCATGAGCGT | 328 | ANSNHER | 1545 | 136.102 |
| 270 | AGGGATACGGGTGATAAGGCT | 329 | RDTGDKA | 1546 | 135.913 |
| 271 | AGAACAGACACGCCGTCAACC | 330 | RTDTPST | 1547 | 135.583 |
| 272 | CCTACTATGTCGAGTCTGAAT | 331 | PTMSSLN | 1548 | 135.539 |
| 273 | GATATTACTAATCAGTCGTAT | 332 | DITNQSY | 1549 | 135.473 |
| 274 | CTTGTAAAACCGGAAACTTGG | 333 | LVKPETW | 1550 | 134.988 |
| 275 | GGGACTTCCTTGGAAAACCGA | 334 | GTSLENR | 1551 | 134.981 |
| 276 | GCTGCTGGTAATCCTACTCGT | 335 | AAGNPTR | 1552 | 134.779 |
| 277 | CACAACGTCGGCCTAGGACAC | 336 | HNVGLGH | 1553 | 134.677 |
| 278 | GTATCAACGACAACGGACCGG | 337 | VSTTTDR | 1554 | 134.639 |
| 279 | TATTTGTCGTCTGGTAAGATG | 338 | YLSSGKM | 1555 | 134.553 |
| 280 | GATAGTCGGAATGCTGCTTTG | 339 | DSRNAAL | 1556 | 134.213 |
| 281 | GTGGAGCGGAATACTGATATG | 340 | VERNTDM | 1557 | 133.962 |
| 282 | ACTGTTGGGAGTAATTCTATT | 341 | TVGSNSI | 1558 | 133.95 |
| 283 | GTGCGGTCTGGTAATAAGCCG | 342 | VRSGNKP | 1559 | 133.87 |
| 284 | GGCAGTTCGGGGAACAGCGGA | 343 | GSSGNSG | 1560 | 133.776 |
| 285 | TCTACTTCAATAGGAGTGGTA | 344 | STSIGW | 1561 | 133.69 |
| 286 | CCGAGTCAGAGTAGGTCGCTT | 345 | PSQSRSL | 1562 | 133.6751 |
| 287 | CGGAATGAGAATCTTAATAAT | 346 | RNENLNN | 1563 | 133.26 |
| 288 | TCGTTGGGTAAGAGGGAGGAG | 347 | SLGKREE | 1564 | 133.032 |
| 289 | TCACGCTTGGACTCGAGCTCC | 348 | SRLDSSS | 1565 | 132.783 |
| 290 | GATTCGACGTATGTTTTGGCT | 349 | DSTYVLA | 1566 | 132.54 |
| 291 | GAGCGTAATCCTATTTCTGAT | 350 | ERNPISD | 1567 | 132.49 |
| 292 | GTTAGCTCCGGCCACACGAAA | 351 | VSSGHTK | 1568 | 132.466 |
| 293 | AAGTATACGGAGTCGAATGCG | 352 | KYTESNA | 1569 | 132.305 |
| 294 | AACCGCAACTCAGTTGGGACT | 353 | NRNSVGT | 1570 | 132.2576 |
| 295 | CACGAAAGCCACTACGTGTCA | 354 | HESHYVS | 1571 | 132.014 |
| 296 | ACGACTGGGGGGACGGGGATG | 355 | TTGGTGM | 1572 | 131.954 |
| 297 | GCGACTGATAAGATGACTCCT | 356 | ATDKMTP | 1573 | 131.931 |
| 298 | TCCGCGTCTAGCGGCGCTACA | 357 | SASSGAT | 1574 | 131.886 |
| 299 | TCAACCACTACTGGCCACATG | 358 | STTTGHM | 1575 | 131.581 |
| 300 | ATAATAGCATCCTCTACCACG | 359 | IIASSTT | 1576 | 131.506 |
| 301 | GATACTGGGTCTAGGATTGCG | 360 | DTGSRIA | 1577 | 131.486 |
| 302 | TGGGCTGATGATTCGCAGCGG | 361 | WADDSQR | 1578 | 131.47 |
| 303 | AGGGGTAACACTCTCGAAATG | 362 | RGNTLEM | 1579 | 131.381 |
| 304 | AATCTGCAGGTGAATGCGAAT | 363 | NLQVNAN | 1580 | 131.172 |
| 305 | GCGACGACTCAGCTGATGACT | 364 | ATTQLMT | 1581 | 130.96 |
| 306 | GCTGATACGAATATTATTGTG | 365 | ADTNUV | 1582 | 130.47 |
| 307 | GCCATAACAATCACTCAAAAA | 366 | AITITQK | 1583 | 130.225 |
| 308 | GACTCCAACAAAGGAGCGACG | 367 | DSNKGAT | 1584 | 130.1749 |
| 309 | GGCAACGCTTCCGGAAACCCA | 368 | GNASGNP | 1585 | 129.97 |
| 310 | ACGATGGGTGCTAAAGGTACT | 369 | TMGAKGT | 1586 | 129.92 |
| 311 | TATCTGCAGACGGGTACTCTG | 370 | YLQTGTL | 1587 | 129.907 |
| 312 | GCATTACACACCAAAGACCTA | 371 | ALHTKDL | 1588 | 129.846 |
| 313 | GTCGACAAAAGCGAAGCCGTC | 372 | VDKSEAV | 1589 | 129.734 |
| 314 | GGGAGGACGGATCTTATGGCG | 373 | GRTDLMA | 1590 | 129.651 |
| 315 | GGCACGGAACCGCGCACTGCA | 374 | GTEPRTA | 1591 | 129.37 |
| 316 | AGAGGCGACATGTCACGAGAA | 375 | RGDMSRE | 1592 | 129.137 |
| 317 | CGGGGGGATACTAAGTCTAAG | 376 | RGDTKSK | 1593 | 128.94 |
| 318 | GGGACATTAGCCTCAATGTCC | 377 | GTLASMS | 1594 | 128.734 |
| 319 | CAGAAGTCTGTGACGTATTCG | 378 | QKSVTYS | 1595 | 128.602 |
| 320 | AGTACGGGGCAGACTCTTGTT | 379 | STGQTLV | 1596 | 128.1669 |
| 321 | TCGCACATAAACATGGGGTCG | 380 | SHINMGS | 1597 | 128.101 |
| 322 | GCGTTGAATGGTACTGGTAAT | 381 | ALNGTGN | 1598 | 128.045 |
| 323 | ACTACGAGTTCGAATCAGCAT | 382 | TTSSNQH | 1599 | 128.003 |
| 324 | AAAAACTACGCAAGCACCGAC | 383 | KNYASTD | 1600 | 127.84 |
| 325 | GAATCCACAAGCAGGACGTAC | 384 | ESTSRTY | 1601 | 127.765 |
| 326 | CCGCGTTCTATTACGGAGTTG | 385 | PRSITEL | 1602 | 127.623 |
| 327 | TACATAGCCGGAGGAGAAAAA | 386 | YIAGGEK | 1603 | 127.544 |
| 328 | ACTAGTAATTATATGCATGAG | 387 | TSNYMHE | 1604 | 127.522 |
| 329 | TTGGATCCTAATAGTACTCGG | 388 | LDPNSTR | 1605 | 127.175 |
| 330 | CACAGTGACATGGGCTCAAGC | 389 | HSDMGSS | 1606 | 127.01 |
| 331 | GACACCGCCAACCGATCCACA | 390 | DTANRST | 1607 | 127.01 |
| 332 | AACGCCGGACACAGCGGTCAA | 391 | NAGHSGQ | 1608 | 126.611 |
| 333 | AGTTTGGGGTCGGATCGTATG | 392 | SLGSDRM | 1609 | 126.579 |
| 334 | GACAACCAACAAGCCCTAGCT | 393 | DNQQALA | 1610 | 126.49 |
| 335 | CCATCCTCAGCGGGTAGCACA | 394 | PSSAGST | 1611 | 126.201 |
| 336 | GACAGGAAAGGGTACGACGCA | 395 | DRKGYDA | 1612 | 126.06 |
| 337 | GGAGGAAACCAAAACCTTACT | 396 | GGNQNLT | 1613 | 125.7806 |
| 338 | GTGAATCTGAATGAGACGGAG | 397 | VNLNETE | 1614 | 125.719 |
| 339 | TCCCCCGGCAACGGGTTGCTA | 398 | SPGNGLL | 1615 | 125.687 |
| 340 | TCTGTCGGGGACCTCACAAAA | 399 | SVGDLTK | 1616 | 125.627 |
| 341 | CGATACGAATCCGTCGGACTC | 400 | RYESVGL | 1617 | 125.54 |
| 342 | ACGAGAGAATTGACAAAAAAC | 401 | TRELTKN | 1618 | 125.47 |
| 343 | ACTCCAACTAACGGGAACCCT | 402 | TPTNGNP | 1619 | 125.37 |
| 344 | GCGACTGATCAGCGTTCGAGG | 403 | ATDQRSR | 1620 | 125.26 |
| 345 | GGAACATCGGCAGAATCACGC | 404 | GTSAESR | 1621 | 125.214 |
| 346 | AGGATGCTCTCTACTTTGCCT | 405 | RMLSTLP | 1622 | 125.088 |
| 347 | GGTATCAACTCCTCACACTTC | 406 | GINSSHF | 1623 | 125.044 |
| 348 | AGTAGCTCAACTGAAGGGCAA | 407 | SSSTEGQ | 1624 | 124.971 |
| 349 | GACAAACAACAAACCGGACAA | 408 | DKQQTGQ | 1625 | 124.923 |
| 350 | ACCCAACACCTACCATCCACA | 409 | TQHLPST | 1626 | 124.773 |
| 351 | GGTCTGGGGCAGCCTCAGTTG | 410 | GLGQPQL | 1627 | 124.752 |
| 352 | GTGACTAATGAGAGTCGTGCT | 411 | VTNESRA | 1628 | 124.728 |
| 353 | GGCAACTCGAACTACCGAGAA | 412 | GNSNYRE | 1629 | 124.482 |
| 354 | TGGAATGCTGAGAATAGTAAG | 413 | WNAENSK | 1630 | 124.373 |
| 355 | CCTGGGAGTCAGCGTCAGGAT | 414 | PGSQRQD | 1631 | 124.325 |
| 356 | CATACGTATTCGCAGGCTGAT | 415 | HTYSQAD | 1632 | 124.3 |
| 357 | ACTGCCGGCAACCTAAGAAGT | 416 | TAGNLRS | 1633 | 124.203 |
| 358 | GGCAGACACCTTCAATCGGAC | 417 | GRHLQSD | 1634 | 124.19 |
| 359 | AACAACGCACACACCGCCACT | 418 | NNAHTAT | 1635 | 124.118 |
| 360 | AGTACGAGTCAGGAGAATAGG | 419 | STSQENR | 1636 | 124.0658 |
| 361 | AGGGGTGATACTATGAATTAT | 420 | RGDTMNY | 1637 | 124.04 |
| 362 | CCGGTTGCTACTCAGCATGCG | 421 | PVATQHA | 1638 | 123.9189 |
| 363 | GGGCATTTGAATGCTCCGACT | 422 | GHLNAPT | 1639 | 123.495 |
| 364 | CAAATATTAAACTACTCAGTC | 423 | QILNYSV | 1640 | 123.4 |
| 365 | CAAAACCACGCGTCTGGTGAA | 424 | QNHASGE | 1641 | 123.372 |
| 366 | GGTTTAACAGGGCGGGAACTA | 425 | GLTGREL | 1642 | 123.32 |
| 367 | GACGTAGCCGTGACTCAACAC | 426 | DVAVTQH | 1643 | 123.31 |
| 368 | GCAACTTACACCGGGCGAACA | 427 | ATYTGRT | 1644 | 123.292 |
| 369 | AAAGAACTACAATGGCAACGA | 428 | KELQWQR | 1645 | 123.251 |
| 370 | GCTAGTTATAGTAGTATGGTG | 429 | ASYSSMV | 1646 | 123.193 |
| 371 | GTTATTAGTCATGGGGCGCTG | 430 | VISHGAL | 1647 | 123.094 |
| 372 | CCTATACACCACGGTTCATCC | 431 | PIHHGSS | 1648 | 123.09 |
| 373 | GTGGATAAGAATCATCCTTTG | 432 | VDKNHPL | 1649 | 123.04 |
| 374 | ACCTCGGGTGACCGGTACACG | 433 | TSGDRYT | 1650 | 122.844 |
| 375 | GGGACAAAAAGCTGGCCTGTC | 434 | GTKSWPV | 1651 | 122.8432 |
| 376 | TACAACGCCCACGAATCATTC | 435 | YNAHESF | 1652 | 122.813 |
| 377 | AGAGTCCACGACACTCCTTCA | 436 | RVHDTPS | 1653 | 122.7503 |
| 378 | GCACAAATCGAATCAGGCCGA | 437 | AQIESGR | 1654 | 122.66 |
| 379 | TGGAAGGATAATATGCGGATG | 438 | WKDNMRM | 1655 | 122.624 |
| 380 | ATGCCTAGTGAACCACCAGGG | 439 | MPSEPPG | 1656 | 122.51 |
| 381 | CGTGGTGATTATCCGACGTCG | 440 | RGDYPTS | 1657 | 122.487 |
| 382 | TTTCATAATGAGTCTTATGGG | 441 | FHNESYG | 1658 | 122.36 |
| 383 | TTGAATACGATGATTGATAAG | 442 | LNTMIDK | 1659 | 122.272 |
| 384 | TCCACACTAAGCCAAGGAGCA | 443 | STLSQGA | 1660 | 122.2662 |
| 385 | CCTTTGCACAACATACCTCCT | 444 | PLHNIPP | 1661 | 122.24 |
| 386 | GCTTCGTCTACGTTTTTGCCT | 445 | ASSTFLP | 1662 | 122.24 |
| 387 | ATGGAAGGAATGGGACTCGGA | 446 | MEGMGLG | 1663 | 122.04 |
| 388 | AAGGATTATAAGCCGTATGCT | 447 | KDYKPYA | 1664 | 121.95 |
| 389 | AATTTGCAGTCTGGTGTTCAG | 448 | NLQSGVQ | 1665 | 121.91 |
| 390 | ACAACTCTTAGCCAACAAAGC | 449 | TTLSQQS | 1666 | 121.82 |
| 391 | CTTATGTCGTCTACTTCCTCA | 450 | LMSSTSS | 1667 | 121.536 |
| 392 | ACTGGCCAAGGATTCTCGGCA | 451 | TGQGFSA | 1668 | 121.45 |
| 393 | TCTACAATCGGCAACAGCACG | 452 | STIGNST | 1669 | 121.27 |
| 394 | CTGAGGGCGAGTGAGGCTCCG | 453 | LRASEAP | 1670 | 121.2297 |
| 395 | CAGCCTAATAATGGTAATCAT | 454 | QPNNGNH | 1671 | 121.02 |
| 396 | TCGTCAGACGTTACCAGACAA | 455 | SSDVTRQ | 1672 | 120.98 |
| 397 | CGGGGTGACGCAACAGAAATG | 456 | RGDATEM | 1673 | 120.74 |
| 398 | TATAGGGGTAGGGAGGATTGG | 457 | YRGREDW | 1674 | 120.58 |
| 399 | AGCTTGCAACAATCACAATTG | 458 | SLQQSQL | 1675 | 120.491 |
| 400 | AAGCCGACTGCGAATGATTGG | 459 | KPTANDW | 1676 | 120.3784 |
| 401 | CGTCTGACTGATACTATGCAT | 460 | RLTDTMH | 1677 | 120.35 |
| 402 | CTTCATGGGAATTATAGTCCG | 461 | LHGNYSP | 1678 | 120.346 |
| 403 | ATTCCGGTTGGGGCGATGGCT | 462 | IPVGAMA | 1679 | 120.248 |
| 404 | CCGAACACCGCCTCAAACTTC | 463 | PNTASNF | 1680 | 120.24 |
| 405 | ACGAGTAGAGAAGTCAAAGGG | 464 | TSREVKG | 1681 | 120.171 |
| 406 | GACACGTCCTCCGGCAACAGG | 465 | DTSSGNR | 1682 | 119.94 |
| 407 | GAAGCAGTAACAAGTAAATGG | 466 | EAVTSKW | 1683 | 119.919 |
| 408 | CTAATCACAGCCACCACTAAC | 467 | LITATTN | 1684 | 119.872 |
| 409 | GATGGGGGTCGTTCGGGTATT | 468 | DGGRSGI | 1685 | 119.847 |
| 410 | TTCATGGAAGTCATGAAAAAC | 469 | FMEVMKN | 1686 | 119.82 |
| 411 | TCCTACCAAAACCCACCACCA | 470 | SYQNPPP | 1687 | 119.701 |
| 412 | ACTAATGTGACGTTTAAGCTT | 471 | TNVTFKL | 1688 | 119.681 |
| 413 | ATTTCTACGCATACGATGACG | 472 | ISTHTMT | 1689 | 119.64 |
| 414 | GAAACCCAAGGAGCAAGATAC | 473 | ETQGARY | 1690 | 119.591 |
| 415 | GCGGCTTATGAGCATGCGCCT | 474 | AAYEHAP | 1691 | 119.588 |
| 416 | TCAACGAACGACCGTGCGTTA | 475 | STNDRAL | 1692 | 119.57 |
| 417 | TTCACCGAACGCGCACTCCAA | 476 | FTERALQ | 1693 | 119.423 |
| 418 | GTAGCGGGCTTAGTCGACATA | 477 | VAGLVDI | 1694 | 119.41 |
| 419 | AGCTCGGTAACTAACCTTGCA | 478 | SSVTNLA | 1695 | 119.38 |
| 420 | GATACTACTACTGGTCATCTT | 479 | DTTTGHL | 1696 | 119.27 |
| 421 | ACGCGTAATTTGTCTGAGAGT | 480 | TRNLSES | 1697 | 118.919 |
| 422 | CAGGTGAATGTTGGGCCTGGT | 481 | QVNVGPG | 1698 | 118.831 |
| 423 | AAACAAACGATGTCCGACACA | 482 | KQTMSDT | 1699 | 118.829 |
| 424 | ATGTCGACAACCAGCAAAACT | 483 | MSTTSKT | 1700 | 118.7215 |
| 425 | ACTACAATAGGGACAAACCAA | 484 | TTIGTNQ | 1701 | 118.676 |
| 426 | GGGACTCTGACGCCGAATCTT | 485 | GTLTPNL | 1702 | 118.622 |
| 427 | TTTGATAGTTATAATATTGTG | 486 | FDSYNIV | 1703 | 118.51 |
| 428 | CGTGGTGCGCCTGAGCAAGCG | 487 | RGAPEQA | 1704 | 118.47 |
| 429 | ATCGAAAACGTAAACCACTTG | 488 | IENVNHL | 1705 | 118.42 |
| 430 | AGGTCTCTGGAGAGTCAGGCT | 489 | RSLESQA | 1706 | 118.231 |
| 431 | CAGTATACGAGTCTGAGTCCG | 490 | QYTSLSP | 1707 | 118.006 |
| 432 | ACGAAGGGTTATAATGATCTT | 491 | TKGYNDL | 1708 | 117.876 |
| 433 | GTCGCCTCGATGGTACACAAC | 492 | VASMVHN | 1709 | 117.874 |
| 434 | TCCACAACCCACACCTCAGCA | 493 | STTHTSA | 1710 | 117.821 |
| 435 | CTTGCGCACCCACAACCAAAC | 494 | LAHPQPN | 1711 | 117.542 |
| 436 | TCGATAAACAACATAGGCGCA | 495 | SINNIGA | 1712 | 117.538 |
| 437 | GCTATAGACTCCATCAAAATG | 496 | AIDSIKM | 1713 | 117.472 |
| 438 | TCTATGTATGGGCAGGCTGGG | 497 | SMYGQAG | 1714 | 117.362 |
| 439 | GAGTATGCTAATGCTAAGACT | 498 | EYANAKT | 1715 | 117.351 |
| 440 | TATCGGGCTTCGGATGTGGCG | 499 | YRASDVA | 1716 | 117.348 |
| 441 | GTTAGTTTGGAGAGTCGGTTG | 500 | VSLESRL | 1717 | 117.332 |
| 442 | ATTGAGACTAGTTCGCGTTCG | 501 | IETSSRS | 1718 | 117.176 |
| 443 | ATGGGAGTGAAACCCGAACAA | 502 | MGVKPEQ | 1719 | 116.975 |
| 444 | GCGCTTCCGTCTCGTGAGCGG | 503 | ALPSRER | 1720 | 116.914 |
| 445 | GGCACCGGATCTTCAGCGCAC | 504 | GTGSSAH | 1721 | 116.896 |
| 446 | CAAACGAACACCAACGACAGA | 505 | QTNTNDR | 1722 | 116.664 |
| 447 | GTATTACACTCTGTATCAGCA | 506 | VLHSVSA | 1723 | 116.583 |
| 448 | CCTTATTCTGCTACTGATCGG | 507 | PYSATDR | 1724 | 116.577 |
| 449 | GCAAACTCCGGATTACACAAC | 508 | ANSGLHN | 1725 | 116.505 |
| 450 | TATGAGAGTACTCATGTTAAT | 509 | YESTHVN | 1726 | 116.418 |
| 451 | AACAACGCACTAGTAGGAAGT | 510 | NNALVGS | 1727 | 116.34 |
| 452 | GGTATCAACTCCTCACACATC | 511 | GINSSHI | 1728 | 116.28 |
| 453 | AGTATTTCTGATAAGAATCAG | 512 | SISDKNQ | 1729 | 116.141 |
| 454 | GACCACCAACAAGCCCTAGCA | 513 | DHQQALA | 1730 | 116.13 |
| 455 | GACTCTACCAAAGCCATGCAA | 514 | DSTKAMQ | 1731 | 116.116 |
| 456 | ACTATTACTAGTCAGTCGGTG | 515 | TITSQSV | 1732 | 115.95 |
| 457 | GGCGCCCGTACAATCTTAGAC | 516 | GARTILD | 1733 | 115.938 |
| 458 | GAGCATAGTCCTACGACTGGT | 517 | EHSPTTG | 1734 | 115.8995 |
| 459 | GGGCTCACAGGATACCCAATG | 518 | GLTGYPM | 1735 | 115.844 |
| 460 | ACGATGGAATCCGGCCGCCAC | 519 | TMESGRH | 1736 | 115.82 |
| 461 | TCTGCGTCGAAAGTGGAATAC | 520 | SASKVEY | 1737 | 115.719 |
| 462 | GATAAGTCTAATTATAGTATT | 521 | DKSNYSI | 1738 | 115.714 |
| 463 | TTCAACGAAACTGCCGGGCGA | 522 | FNETAGR | 1739 | 115.65 |
| 464 | CAAAAATCGGAAACCTACACT | 523 | QKSETYT | 1740 | 115.528 |
| 465 | GCACTTACCCGTATGCCTAAC | 524 | ALTRMPN | 1741 | 115.476 |
| 466 | CGTAACGGCTCCGCCCAAAGC | 525 | RNGSAQS | 1742 | 115.465 |
| 467 | GCGAGGGATACGCCTGGGATT | 526 | ARDTPGI | 1743 | 115.432 |
| 468 | ATTGTTAATGCTGAGATTTAT | 527 | FVNAEIY | 1744 | 115.31 |
| 469 | CGACAAGGCGACTTAAAAGAA | 528 | RQGDLKE | 1745 | 115.3059 |
| 470 | CGAAACAACCCATCGCACGAC | 529 | RNNPSHD | 1746 | 115.224 |
| 471 | CTCGCCCACAACTACTTAAGC | 530 | LAHNYLS | 1747 | 115.195 |
| 472 | AACACCCACAACCTACAAATG | 531 | NTHNLQM | 1748 | 115.171 |
| 473 | CGAGGAGACCACAGCACACAG | 532 | RGDHSTQ | 1749 | 115.12 |
| 474 | CTCCACGGAGTCAGCAGTATA | 533 | LHGVSSI | 1750 | 115.105 |
| 475 | GGTATTAATCATGTGGCGTCT | 534 | GINHVAS | 1751 | 115.102 |
| 476 | ACTGATAAGCTTCAGGGTGTG | 535 | TDKLQGV | 1752 | 115.062 |
| 477 | GGAACCTCCATAGACTACGTA | 536 | GTSIDYV | 1753 | 115.053 |
| 478 | TCGAACACTGCCCCCCCCCCC | 537 | SNTAPPP | 1754 | 115.034 |
| 479 | ACTGCTAAGAGTTATGGGCCT | 538 | TAKSYGP | 1755 | 115.006 |
| 480 | GACCACCAACAAGCACTAGCT | 539 | DHQQALA | 1756 | 114.98 |
| 481 | ACACAAGTAGTCGCAAGAACA | 540 | TQWART | 1757 | 114.9299 |
| 482 | AGTCCTCCTAGTACGTCGGGT | 541 | SPPSTSG | 1758 | 114.816 |
| 483 | CCTATGCGAACACCACCGTAC | 542 | PMRTPPY | 1759 | 114.806 |
| 484 | GCTGCTGGTAATACTACTCGT | 543 | AAGNTTR | 1760 | 114.78 |
| 485 | AGAGGCGACTAATCCACACCC | 544 | RGD*STP | 1761 | 114.78 |
| 486 | CTAGCGAAAACTGTCGCTATC | 545 | LAKTVAI | 1762 | 114.722 |
| 487 | TCTAAATCTGAAAACCTGCAA | 546 | SKSENLQ | 1763 | 114.59 |
| 488 | ACTCAGACGTCGTATGCTACG | 547 | TQTSYAT | 1764 | 114.505 |
| 489 | ACTGGGGATAGGACTTCGGTG | 548 | TGDRTSV | 1765 | 114.4766 |
| 490 | ATATCGCAAGGCTCGAGCCTC | 549 | ISQGSSL | 1766 | 114.305 |
| 491 | CTTGTTCAGATGGGGAGTGTG | 550 | LVQMGSV | 1767 | 114.256 |
| 492 | TTATCCGCAACATCTACGATG | 551 | LSATSTM | 1768 | 114.245 |
| 493 | CAAAACCACAACGAACTAAAA | 552 | QNHNELK | 1769 | 114.217 |
| 494 | CGTGGTGCGCCTGAGCATGCG | 553 | RGAPEHA | 1770 | 114.09 |
| 495 | TCTTCTTTCGGAAAAGACAAC | 554 | SSFGKDN | 1771 | 113.982 |
| 496 | AACGCTAACGCCGGTGGAAAC | 555 | NANAGGN | 1772 | 113.958 |
| 497 | GATCATCATCCTCAGAGTCGT | 556 | DHHPQSR | 1773 | 113.83 |
| 498 | ATGAGGCATGAGGCTCCTCTT | 557 | MRHEAPL | 1774 | 113.819 |
| 499 | AAGGGGGATGGTGCTTATGAG | 558 | KGDGAYE | 1775 | 113.742 |
| 500 | CCTATGAATGGTATTCTGTTG | 559 | PMNGILL | 1776 | 113.722 |
| 501 | AGTAGTGGGGGTATGAAGGCG | 560 | SSGGMKA | 1777 | 113.69 |
| 502 | GTGCTGGTTACTCAGAATCAT | 561 | VLVTQNH | 1778 | 113.631 |
| 503 | GAGATTAATAATCGGACTGGT | 562 | EINNRTG | 1779 | 113.588 |
| 504 | TTACCAACAGGCGTCCTGCCC | 563 | LPTGVLP | 1780 | 113.561 |
| 505 | GCCTACGGTATCAGAGAAGTG | 564 | AYGIREV | 1781 | 113.547 |
| 506 | TCGACAAACTCTATAGGCGCC | 565 | STNSIGA | 1782 | 113.471 |
| 507 | GTGCAGTTGACGCATAATGGG | 566 | VQLTHNG | 1783 | 113.43 |
| 508 | GTTCAGTTGGAGAATGCGAAT | 567 | VQLENAN | 1784 | 113.43 |
| 509 | GGAAAAGCCAACGACGGTTCT | 568 | GKANDGS | 1785 | 113.427 |
| 510 | ACCGGGGTTCGAGAAACCATA | 569 | TGVRETI | 1786 | 113.41 |
| 511 | GGCCTGAACCAGATCACATCG | 570 | GLNQITS | 1787 | 113.4 |
| 512 | ACGGAGAAGGCGAGTCCTCTG | 571 | TEKASPL | 1788 | 113.381 |
| 513 | TTTCTGGAGGGTGTTGCGCAG | 572 | FLEGVAQ | 1789 | 113.333 |
| 514 | ACGAATTATAATATTGGTCCG | 573 | TNYNIGP | 1790 | 113.318 |
| 515 | AGAGGAGACTTGACAACCACA | 574 | RGDLTTT | 1791 | 113.29 |
| 516 | ATGATGAATGTGAGTGGTCAT | 575 | MMNVSGH | 1792 | 113.09 |
| 517 | TCTCAGTCGATTAATGGGCTT | 576 | SQSINGL | 1793 | 113.084 |
| 518 | CTCACGACTTTAACTAACCAC | 577 | LTTLTNH | 1794 | 113.033 |
| 519 | AACTCTGTTCAATCCACCCCA | 578 | NSVQSTP | 1795 | 113.021 |
| 520 | TATAATACGGATCGGACTAAT | 579 | YNTDRTN | 1796 | 113.001 |
| 521 | GAGAAGCCTCAGCATAATAGT | 580 | EKPQHNS | 1797 | 112.98 |
| 522 | ACGATGGCTACAAACTTAAGT | 581 | TMATNLS | 1798 | 112.937 |
| 523 | GTGGGGACGCATTTGCATTCG | 582 | VGTHLHS | 1799 | 112.918 |
| 524 | GACGCCCACCACTCAAGCAGC | 583 | DAHHSSS | 1800 | 112.88 |
| 525 | CTTGTGGGGACTTTGGTGTAT | 584 | LVGTLVY | 1801 | 112.853 |
| 526 | TATGGTGTGCAGGCGAATAGT | 585 | YGVQANS | 1802 | 112.806 |
| 527 | GTTTTGTCTGATAAGGCGTAT | 586 | VLSDKAY | 1803 | 112.787 |
| 528 | CTTGAGGGTCAGAATAAGACG | 587 | LEGQNKT | 1804 | 112.731 |
| 529 | GAGGTTAGTAATAATAATTAT | 588 | EVSNNNY | 1805 | 112.69 |
| 530 | GCCCACCAACAAGCCCTAGCT | 589 | AHQQALA | 1806 | 112.67 |
| 531 | CTTCCGACCACACTCAACCAC | 590 | LPTTLNH | 1807 | 112.667 |
| 532 | TACATAGCAGGTGGTGAACAA | 591 | YIAGGEQ | 1808 | 112.6513 |
| 533 | AATTCTGGTACTCTTTATCAG | 592 | NSGTLYQ | 1809 | 112.609 |
| 534 | CGGGGTCTGCCTGATGTTAAT | 593 | RGLPDVN | 1810 | 112.43 |
| 535 | AACCAACAACTATCCCACTCA | 594 | NQQLSHS | 1811 | 112.375 |
| 536 | AATCCTAGTTATGATCATCGG | 595 | NPSYDHR | 1812 | 112.363 |
| 537 | ATAGACAGCGACACCTTCGTA | 596 | IDSDTFV | 1813 | 112.355 |
| 538 | ACCGCTTACCTTGCGGGATTA | 597 | TAYLAGL | 1814 | 112.17 |
| 539 | CATAGTAATGTTAGTCTTGAG | 598 | HSNVSLE | 1815 | 112.162 |
| 540 | GGTAATAATTTGAGTTTGTCT | 599 | GNNLSLS | 1816 | 112.16 |
| 541 | GTTATGGATACGCATGGGATG | 600 | VMDTHGM | 1817 | 112.145 |
| 543 | ACTAACGCCATCTCTCAAACG | 602 | TNAISQT | 1819 | 112.063 |
| 544 | GCAACACACGCCATGCGCCCA | 603 | ATHAMRP | 1820 | 112.016 |
| 545 | ATGTTAAACAACACAATGATG | 604 | MLNNTMM | 1821 | 111.939 |
| 546 | ATTAGTTCGGGGATTTTGTCG | 605 | ISSGILS | 1822 | 111.907 |
| 547 | CGCCAAGGCAGCTTGATGATA | 606 | RQGSLMI | 1823 | 111.83 |
| 548 | ACGACTGATAAGGGTATTAAT | 607 | TTDKGIN | 1824 | 111.818 |
| 549 | CACAACTTAATGACCCAAATA | 608 | HNLMTQI | 1825 | 111.77 |
| 550 | AACCAAAACACCTACGAACTG | 609 | NQNTYEL | 1826 | 111.756 |
| 551 | GCTAACACCGTCACAGAACGA | 610 | ANTVTER | 1827 | 111.7323 |
| 552 | TCTACGCTGCAGACTAATGGT | 611 | STLQTNG | 1828 | 111.683 |
| 553 | CCCAACGAATACAAAGCACCG | 612 | PNEYKAP | 1829 | 111.646 |
| 554 | ATGCAAACACGCTCGGACACA | 613 | MQTRSDT | 1830 | 111.629 |
| 555 | GGAACAGGGTACGCTGGATCA | 614 | GTGYAGS | 1831 | 111.6183 |
| 556 | ATGGGTATGCAGAATACGCAT | 615 | MGMQNTH | 1832 | 111.599 |
| 557 | TCTAGTAAGGAGCGTACATCG | 616 | SSKERTS | 1833 | 111.57 |
| 558 | CGAACGGACACCCCCTACACC | 617 | RTDTPYT | 1834 | 111.562 |
| 559 | ACTGCGCTGCGGGATAATAAG | 618 | TALRDNK | 1835 | 111.51 |
| 560 | AGGATGTCTGAGAGTTCGGAT | 619 | RMSESSD | 1836 | 111.51 |
| 561 | AACCAATCTATAAGCATGGAC | 620 | NQSISMD | 1837 | 111.491 |
| 562 | TCGCTTGGGCATAGTAATAAT | 621 | SLGHSNN | 1838 | 111.432 |
| 563 | CTTAATAGTGGTGGTGCGATG | 622 | LNSGGAM | 1839 | 111.361 |
| 564 | AACGAACAATTCGAAAAAGTC | 623 | NEQFEKV | 1840 | 111.341 |
| 565 | ATGATGGCGAATAATATGCAG | 624 | MMANNMQ | 1841 | 111.28 |
| 566 | AGTCGGCGCGAAGAACAACCA | 625 | SRREEQP | 1842 | 111.2512 |
| 567 | GCGACTATGACTTCGTCGACG | 626 | ATMTSST | 1843 | 111.238 |
| 568 | CGTGGTTCAGACGGAGGATTG | 627 | RGSDGGL | 1844 | 111.172 |
| 569 | AGTTTGACGCCTAATAATCTT | 628 | SLTPNNL | 1845 | 111.152 |
| 570 | GCTACTCTTTCTCCGCATGCT | 629 | ATLSPHA | 1846 | 111.132 |
| 571 | TATCTGCAGGAGAAGTTTCCT | 630 | YLQEKFP | 1847 | 111.112 |
| 572 | GGCACCGGGTACCCAAACCAA | 631 | GTGYPNQ | 1848 | 111.111 |
| 573 | AATTATCCTTCGGTTCAGGAG | 632 | NYPSVQE | 1849 | 111.07 |
| 574 | ACTGACGCATCGGGTAGATCA | 633 | TDASGRS | 1850 | 111.017 |
| 575 | CGTGTGATTACTGCGGGTGAT | 634 | RVITAGD | 1851 | 111.009 |
| 576 | GTGACTGTGAGTAATAGTCTG | 635 | VTVSNSL | 1852 | 110.95 |
| 577 | TTGTTGACGGCTCCGCATAGG | 636 | LLTAPHR | 1853 | 110.908 |
| 578 | TCAATCGCAAACCACATGATA | 637 | SIANHMI | 1854 | 110.861 |
| 579 | ATGCCTTCGAAAGGCGAAGTA | 638 | MPSKGEV | 1855 | 110.816 |
| 580 | AACATGACCAACGAACGGCTC | 639 | NMTNERL | 1856 | 110.801 |
| 581 | TCATTCTCTTCAGGCATAATG | 640 | SFSSGIM | 1857 | 110.771 |
| 582 | CGCGACCGTCAAGACTCGGTA | 641 | RDRQDSV | 1858 | 110.754 |
| 583 | CACGGTGACCGAACAGCTTTA | 642 | HGDRTAL | 1859 | 110.748 |
| 584 | GAAGTACGGGGCAGCGTGCCA | 643 | EVRGSVP | 1860 | 110.747 |
| 585 | CTGATTTCGACTGGTAATAAT | 644 | LISTGNN | 1861 | 110.735 |
| 586 | CCAACATCTGGGGACAAACCG | 645 | PTSGDKP | 1862 | 110.735 |
| 587 | AAAGCGGACCACAGTGGGGCA | 646 | KADHSGA | 1863 | 110.73 |
| 588 | CTAAACGACGTCTACCGTAAA | 647 | LNDVYRK | 1864 | 110.724 |
| 589 | AACAGTTTGCAAGCAAGTGCA | 648 | NSLQASA | 1865 | 110.72 |
| 590 | TATCATAATGAGATTATGACG | 649 | YHNEIMT | 1866 | 110.708 |
| 591 | AACAACACCCTAAACATCCTA | 650 | NNTLNIL | 1867 | 110.69 |
| 592 | TCTTATGGGCAGGGTCTGGAG | 651 | SYGQGLE | 1868 | 110.684 |
| 593 | ATGATAAAAACCAACATGTTG | 652 | MIKTNML | 1869 | 110.668 |
| 594 | ACCGAAGCGGGCCGCCCCCAA | 653 | TEAGRPQ | 1870 | 110.663 |
| 595 | AGGATTGATCAGACTAATGTG | 654 | RIDQTNV | 1871 | 110.624 |
| 596 | GAGGGGCATAATCGTGGTATT | 655 | EGHNRGI | 1872 | 110.559 |
| 597 | ATGGGGACTGAGTATCGTATG | 656 | MGTEYRM | 1873 | 110.524 |
| 598 | TCGGGTATGAATAGTAATAAG | 657 | SGMNSNK | 1874 | 110.499 |
| 599 | TTGACTAATGATAATAAGTTG | 658 | LTNDNKL | 1875 | 110.479 |
| 600 | TTACACAACTACCAAGACCGT | 659 | LHNYQDR | 1876 | 110.438 |
| 601 | AAGTCTAATTTGGAGGGTAAG | 660 | KSNLEGK | 1877 | 110.438 |
| 602 | CTTACTGGTCAGAATGCGATT | 661 | LTGQNAI | 1878 | 110.416 |
| 603 | CATACTGTGGGGGCTATGCAT | 662 | HTVGAMH | 1879 | 110.41 |
| 604 | CTCCAACTGGCTACATCCCAC | 663 | LQLATSH | 1880 | 110.384 |
| 605 | AGTCTGAATGGGGTGTTGGTT | 664 | SLNGVLV | 1881 | 110.359 |
| 606 | AGTCACAACCAAGTAAACGTA | 665 | SHNQVNV | 1882 | 110.349 |
| 607 | AGTTTGAGTACTGATGTGTTT | 666 | SLSTDVF | 1883 | 110.261 |
| 608 | ATGGTAGGTCGTGCCGAAATC | 667 | MVGRAEI | 1884 | 110.224 |
| 609 | TTGTCTAGTATGAGTACGGAT | 668 | LSSMSTD | 1885 | 110.204 |
| 610 | TCCTACAGTACTTCAACACCG | 669 | SYSTSTP | 1886 | 110.189 |
| 611 | TCCGAATTAATGGTCAGACCC | 670 | SELMVRP | 1887 | 110.0813 |
| 612 | TGGAACGGAAACGCCACACAA | 671 | WNGNATQ | 1888 | 110.039 |
| 613 | ATGGATACTGAGCTTTATAGG | 672 | MDTELYR | 1889 | 109.985 |
| 614 | AGGACGAGTCCTGATACGAAT | 673 | RTSPDTN | 1890 | 109.977 |
| 615 | TTCTCAACGCAAGACATAAGC | 674 | FSTQDIS | 1891 | 109.948 |
| 616 | ACGACTGTGCTGGGGAATAAT | 675 | TTVLGNN | 1892 | 109.94 |
| 617 | CAGCGTGATGCTGCGTATGCT | 676 | QRDAAYA | 1893 | 109.927 |
| 618 | CACCAAACCGTGGTCCCTACT | 677 | HQTVVPT | 1894 | 109.8948 |
| 619 | TCTAATCCGGGTAATCATAAT | 678 | SNPGNHN | 1895 | 109.853 |
| 620 | TGGGAGACTATGGCTAAGCCT | 679 | WETMAKP | 1896 | 109.818 |
| 621 | GGTCTTTATCAGAATCCTACG | 680 | GLYQNPT | 1897 | 109.73 |
| 622 | CTTAATCTTACTAATCATAAT | 681 | LNLTNHN | 1898 | 109.727 |
| 623 | ATGAGTCTCGCCTCCACCCAA | 682 | MSLASTQ | 1899 | 109.672 |
| 624 | ACGTCCCAAACCGTCCGAGTA | 683 | TSQTVRV | 1900 | 109.654 |
| 625 | GGAGCAACGGTCAACACGCGA | 684 | GATVNTR | 1901 | 109.64 |
| 626 | AAAGGGGGAAACCTCACCGCA | 685 | KGGNLTA | 1902 | 109.632 |
| 627 | GCGTGGTCTCAAGTCCTGACG | 686 | AWSQVLT | 1903 | 109.587 |
| 628 | GTAGAACACGTAGCCCACCAA | 687 | VEHVAHQ | 1904 | 109.552 |
| 629 | CTAATGTCGTCCTACTCATCA | 688 | LMSSYSS | 1905 | 109.546 |
| 630 | TCTCTGGGTGGGAATCCGCCT | 689 | SLGGNPP | 1906 | 109.511 |
| 631 | AAGAATGAGAATACGAATTAT | 690 | KNENTNY | 1907 | 109.5055 |
| 632 | ATATTGGACAACCACCGTTTC | 691 | ILDNHRF | 1908 | 109.489 |
| 633 | AATTCGTCGCATGTTAATTCT | 692 | NSSHVNS | 1909 | 109.473 |
| 634 | CAGGTGCAGCATGAGAGGGTG | 693 | QVQHERV | 1910 | 109.47 |
| 635 | TTGGGAGGAACCCTGGGAATA | 694 | LGGTLGI | 1911 | 109.46 |
| 636 | ACTCAAGAACGACCACTAATC | 695 | TQERPLI | 1912 | 109.455 |
| 637 | CGTAAGACTGAGGATAGGATG | 696 | RKTEDRM | 1913 | 109.429 |
| 638 | ACCGAACTCACAGCGCGGAAC | 697 | TELTARN | 1914 | 109.398 |
| 639 | CGCGGCGACAACACTTACTCC | 698 | RGDNTYS | 1915 | 109.387 |
| 640 | CAGTCTAATACTAATAATAGT | 699 | QSNTNNS | 1916 | 109.372 |
| 641 | GCTTCTTATAGTATTTCTGAT | 700 | ASYSISD | 1917 | 109.309 |
| 642 | AGCGAACACCACGCCGGAATA | 701 | SEHHAGI | 1918 | 109.281 |
| 643 | CGTGGTGCGCCAGAGCATGCG | 702 | RGAPEHA | 1919 | 109.237 |
| 644 | AATTTTAGTAGTGGTGATGTT | 703 | NFSSGDV | 1920 | 109.229 |
| 645 | AGTGGCATCAACGCCACCGAC | 704 | SGINATD | 1921 | 109.22 |
| 646 | CGGGCTGATGTTTCTTGGTCT | 705 | RADVSWS | 1922 | 109.213 |
| 647 | TGTATGGATGTTGGTAAGGCG | 706 | CMDVGKA | 1923 | 109.203 |
| 648 | GGGGTCGGAGCCACTTCGGTA | 707 | GVGATSV | 1924 | 109.193 |
| 649 | AAAAACAACAACTCAGACAGT | 708 | KNNNSDS | 1925 | 109.177 |
| 650 | AATGTTGCGAGTATTGATAGG | 709 | NVASIDR | 1926 | 109.174 |
| 651 | AATAGTGTGAATGGTCTTCTG | 710 | NSVNGLL | 1927 | 109.154 |
| 652 | ACACTAGACCGAAACCAAACC | 711 | TLDRNQT | 1928 | 109.132 |
| 653 | GACCAAAACTTCGAACGTAGA | 712 | DQNFERR | 1929 | 109.108 |
| 654 | GTCGGTGACAGGAACTTGGTC | 713 | VGDRNLV | 1930 | 109.062 |
| 655 | TTAGAAGTAAACCTGCAAACG | 714 | LEVNLQT | 1931 | 109.057 |
| 656 | ACTAATGGGGGGTCGCTTAAT | 715 | TNGGSLN | 1932 | 109.049 |
| 657 | TTCACGCGCACACCAGTAACC | 716 | FTRTPVT | 1933 | 109.033 |
| 658 | ACACCGGCGGAAAGCAAAGTT | 717 | TPAESKV | 1934 | 108.991 |
| 659 | TTTCCTTCGCATAATGGGGCG | 718 | FPSHNGA | 1935 | 108.959 |
| 660 | GCCAGGAACGTAATGCTGGGG | 719 | ARNVMLG | 1936 | 108.958 |
| 661 | ACGATTCAGGATCATATTAAG | 720 | TIQDHIK | 1937 | 108.942 |
| 662 | ATTAATTCGTATTTGCATGAG | 721 | INSYLHE | 1938 | 108.918 |
| 663 | GCGCATGATGTTACTGTGAAT | 722 | AHDVTVN | 1939 | 108.918 |
| 664 | ACTGTGGGGGTTCAGCAGACG | 723 | TVGVQQT | 1940 | 108.8891 |
| 665 | ACAGGTAGTTCAGACAGATTA | 724 | TGSSDRL | 1941 | 108.887 |
| 666 | AATCATGATACTGCTCATGCT | 725 | NHDTAHA | 1942 | 108.884 |
| 667 | GCCGAATCCCAACTAGCTAGC | 726 | AESQLAS | 1943 | 108.8752 |
| 668 | GGTAATGCGTATAATACGACT | 727 | GNAYNTT | 1944 | 108.818 |
| 669 | AATCATCAGGCTGGTACTACT | 728 | NHQAGTT | 1945 | 108.807 |
| 670 | ACGGTAGGAGAAAACCACCGA | 729 | TVGENHR | 1946 | 108.779 |
| 671 | CTAACTACTAAAATACCCCTC | 730 | LTTKIPL | 1947 | 108.773 |
| 672 | ACTAATTATCCTGAGGCGAAT | 731 | TNYPEAN | 1948 | 108.748 |
| 673 | AATACTGCTCCGCCGAATCAT | 732 | NTAPPNH | 1949 | 108.733 |
| 674 | GTGCTGAGTACGGGGCTGCGG | 733 | VLSTGLR | 1950 | 108.677 |
| 675 | CTCACGTCCCACTCTGCGGGC | 734 | LTSHSAG | 1951 | 108.648 |
| 676 | ATGAATAAGCATGGTGTGCTT | 735 | MNKHGVL | 1952 | 108.5736 |
| 677 | GACCTGACCAGAGCTGCAATA | 736 | DLTRAAI | 1953 | 108.552 |
| 678 | TATATTGTGGATCATGCGAAT | 737 | YIVDHAN | 1954 | 108.526 |
| 679 | AGTGGGCCTGAGAATACGTTG | 738 | SGPENTL | 1955 | 108.526 |
| 680 | CGTTATGGTGATACGGGTATG | 739 | RYGDTGM | 1956 | 108.512 |
| 681 | GATGGTAAGAATAGTTATGCG | 740 | DGKNSYA | 1957 | 108.451 |
| 682 | GAGGCGCATAATCGTGTTATT | 741 | EAHNRVI | 1958 | 108.451 |
| 683 | AGTTTGCAGGCTGGTAGGATG | 742 | SLQAGRM | 1959 | 108.3681 |
| 684 | GATGCGAAGGCTCTTACGACT | 743 | DAKALTT | 1960 | 108.368 |
| 685 | ACCGACACCCGAAAAAACGAC | 744 | TDTRKND | 1961 | 108.357 |
| 686 | GACTCTTCACACTACTCGACA | 745 | DSSHYST | 1962 | 108.219 |
| 687 | ACAATGCACCTTCCCAACCTG | 746 | TMHLPNL | 1963 | 108.214 |
| 688 | CGAGACGGCTCTACTAAAGTT | 747 | RDGSTKV | 1964 | 108.207 |
| 689 | TCAGGGTACCAAATGACAGAA | 748 | SGYQMTE | 1965 | 108.16 |
| 690 | TGCGACTTGTCACAATCATGC | 749 | CDLSQSC | 1966 | 108.133 |
| 691 | AGAAACGCGTCAAACGGCGTA | 750 | RNASNGV | 1967 | 108.044 |
| 692 | CAGTCGCAGAATGTGACTCAG | 751 | QSQNVTQ | 1968 | 108.033 |
| 693 | GATTCTGCTCCGAGTACTATT | 752 | DSAPSTI | 1969 | 108.003 |
| 694 | AGGTCCGTACCATCACCACAC | 753 | RSVPSPH | 1970 | 108.001 |
| 695 | ATGACGTCTGCGTCTCGTGGT | 754 | MTSASRG | 1971 | 107.974 |
| 696 | GCTCTTGCTAGTCGTCCTATG | 755 | ALASRPM | 1972 | 107.907 |
| 697 | CTAAACCTCTCCAACGACTGG | 756 | LNLSNDW | 1973 | 107.899 |
| 698 | GTTTCTACGGCGCAGAGGCAG | 757 | VSTAQRQ | 1974 | 107.896 |
| 699 | CACGCCGACGTTGGCATGAGC | 758 | HADVGMS | 1975 | 107.888 |
| 700 | GCGGGGGGTTTGCTGTCGCGG | 759 | AGGLLSR | 1976 | 107.878 |
| 701 | CATCTTAGTCAGGCTAATCAT | 760 | HLSQANH | 1977 | 107.848 |
| 702 | GTGCATAATCCTACTACTACG | 761 | VHNPTTT | 1978 | 107.8152 |
| 703 | TCTCAGCGGAATCCGGATGAT | 762 | SQRNPDD | 1979 | 107.784 |
| 704 | AGGGAGACTAATAATTTTGCG | 763 | RETNNFA | 1980 | 107.771 |
| 705 | AATGCGGGGGCTCTTATGGGT | 764 | NAGALMG | 1981 | 107.764 |
| 706 | TTGCCGAAGACTGTGAATATG | 765 | LPKTVNM | 1982 | 107.738 |
| 707 | GCAAGTGACCTACAAATGACG | 766 | ASDLQMT | 1983 | 107.723 |
| 708 | CAAGCCCTGGCCACCACAAAC | 767 | QALATTN | 1984 | 107.716 |
| 709 | CATGAGTCGTCTGGTTATCAT | 768 | HESSGYH | 1985 | 107.696 |
| 710 | GGGGTGAATGATCGTGCTAGG | 769 | GVNDRAR | 1986 | 107.69 |
| 711 | CCTCGGGATGCTCTTCGTACT | 770 | PRDALRT | 1987 | 107.673 |
| 712 | AACGACTCCTCGTCAATGTCC | 771 | NDSSSMS | 1988 | 107.641 |
| 713 | GAATACAACACGCGCCACGAC | 772 | EYNTRHD | 1989 | 107.611 |
| 714 | GCGTCTCCGGCGCATACGTCT | 773 | ASPAHTS | 1990 | 107.598 |
| 715 | CAAAACAGCAACACTCCCTCA | 774 | QNSNTPS | 1991 | 107.546 |
| 716 | TTGGCAAAACTAGGGAACTAC | 775 | LAKLGNY | 1992 | 107.541 |
| 717 | GCTAGTGATAGGCAGTCTGGT | 776 | ASDRQSG | 1993 | 107.527 |
| 718 | TATCAGAATGGTGTGCTTCCT | 777 | YQNGVLP | 1994 | 107.5199 |
| 719 | AATAAGTTTGGTTATAATCCT | 778 | NKFGYNP | 1995 | 107.513 |
| 720 | AAAAAAACCAACGGAATCCCC | 779 | KKTNGIP | 1996 | 107.5 |
| 721 | GTTAACGACAACCGAGGAAAC | 780 | VNDNRGN | 1997 | 107.4937 |
| 722 | ATGCACACCATAACGGGATCC | 781 | MHTITGS | 1998 | 107.491 |
| 723 | ATTGATGGTGTTCAGAAGCTT | 782 | IDGVQKL | 1999 | 107.489 |
| 724 | GCGCAGGTTAATAATCATGAT | 783 | AQVNNHD | 2000 | 107.489 |
| 725 | GTTTCTTCGCCTAATGGTACG | 784 | VSSPNGT | 2001 | 107.487 |
| 726 | GATTCTGCTCCGAGGGCTATT | 785 | DSAPRAI | 2002 | 107.455 |
| 727 | TCTGCGAGTGATAGTCAGCAT | 786 | SASDSQH | 2003 | 107.455 |
| 728 | TCGGCTCATCAGACGCCGACG | 787 | SAHQTPT | 2004 | 107.427 |
| 729 | GCGACGCTGAATAATAGTTAT | 788 | ATLNNSY | 2005 | 107.411 |
| 730 | GAAGACAGTATGAGATTCTCT | 789 | EDSMRFS | 2006 | 107.407 |
| 731 | GAACGAAACGGACTAATAGAA | 790 | ERNGLIE | 2007 | 107.405 |
| 732 | TTAGTACTTGACTCACGGAAC | 791 | LVLDSRN | 2008 | 107.382 |
| 733 | ACCGTCGAACAAATAAACTCG | 792 | TVEQINS | 2009 | 107.349 |
| 734 | GGGACAGGTACCGTTGGATGG | 793 | GTGTVGW | 2010 | 107.203 |
| 735 | AATCAGCAGCGTATTGATAAT | 794 | NQQRIDN | 2011 | 107.185 |
| 736 | ATCCAAAACGGGGTCCTGCCA | 795 | IQNGVLP | 2012 | 107.184 |
| 737 | GGAGACATCTCAAGCAGAAAC | 796 | GDISSRN | 2013 | 107.1386 |
| 738 | GTCACTGGCACTACCCCGGGA | 797 | VTGTTPG | 2014 | 107.137 |
| 739 | ACAAGGGAATCAATGTCCATC | 798 | TRESMSI | 2015 | 107.071 |
| 740 | CACACTTACTCACAAGCAGAC | 799 | HTYSQAD | 2016 | 107.012 |
| 741 | TCCAACATGGGCGTAGCCTCT | 800 | SNMGVAS | 2017 | 106.985 |
| 742 | CACGACTTGAACCACGGAAAA | 801 | HDLNHGK | 2018 | 106.942 |
| 743 | CTGTACGGGGGAGCACACCAA | 802 | LYGGAHQ | 2019 | 106.904 |
| 744 | AACGTGTACGGAGACGGAATA | 803 | NVYGDGI | 2020 | 106.87 |
| 745 | TCTACTATTAATATGCGTGCG | 804 | STINMRA | 2021 | 106.868 |
| 746 | AAGATGGGGAGTATTGAGGTT | 805 | KMGSIEV | 2022 | 106.864 |
| 747 | TCCGAAACGCGCGCTGGATAC | 806 | SETRAGY | 2023 | 106.85 |
| 748 | AATGTGGGTAATACTCTTGGG | 807 | NVGNTLG | 2024 | 106.842 |
| 749 | ATTGGTGGGACTGATACGCGG | 808 | IGGTDTR | 2025 | 106.786 |
| 750 | GCCGACAAAGGATTCGGCCAC | 809 | ADKGFGH | 2026 | 106.73 |
| 751 | TGGCAGGATCATAATAAGGTG | 810 | WQDHNKV | 2027 | 106.719 |
| 752 | AACTACGGTTCCGGACGAATC | 811 | NYGSGRI | 2028 | 106.701 |
| 753 | ACTCATAAGCAGGTGGATCTT | 812 | THKQVDL | 2029 | 106.695 |
| 754 | CGGCAGAATGATAAGGGTAAT | 813 | RQNDKGN | 2030 | 106.658 |
| 755 | GGTAGGAATGAGAGTCCGGAG | 814 | GRNESPE | 2031 | 106.658 |
| 756 | GTTTTTACTGGGCAGACGGAG | 815 | VFTGQTE | 2032 | 106.632 |
| 757 | TATGTTGATCGTAAGGATAAT | 816 | YVDRKDN | 2033 | 106.631 |
| 758 | AATAATACTTTGAATATTTTG | 817 | NNTLNIL | 2034 | 106.63 |
| 759 | TTGAGCTACAGCATCCAACAC | 818 | LSYSIQH | 2035 | 106.621 |
| 760 | GCTACCAACAGATCGCCCCTA | 819 | ATNRSPL | 2036 | 106.5898 |
| 761 | GTTCACACCGCAGACACAATA | 820 | VHTADTI | 2037 | 106.564 |
| 762 | GGGCATTTGGTTAATATGTCT | 821 | GHLVNMS | 2038 | 106.56 |
| 763 | TTAGACTACACCCCTCAAAAC | 822 | LDYTPQN | 2039 | 106.519 |
| 764 | TCCGCCTCTTACTCCAGGATG | 823 | SASYSRM | 2040 | 106.501 |
| 765 | TCCGGAGCGGCACAAAACCCA | 824 | SGAAQNP | 2041 | 106.499 |
| 766 | AGAAACACACTTGCTGACCTT | 825 | RNTLADL | 2042 | 106.496 |
| 767 | GGTTCTACGGTGTCGGCGCAG | 826 | GSTVSAQ | 2043 | 106.491 |
| 768 | TCTAAGGATAGTACTATGTAT | 827 | SKDSTMY | 2044 | 106.48 |
| 769 | GTGGTGGTTCACACTATCCCA | 828 | VVVHTIP | 2045 | 106.45 |
| 770 | CCACGTACTGTCTCATTGGAC | 829 | PRTVSLD | 2046 | 106.4434 |
| 771 | ATGATGAAGAGTGAGGAGAAT | 830 | MMKSEEN | 2047 | 106.425 |
| 772 | ACCACCGACCGGCCAAACGGA | 831 | TTDRPNG | 2048 | 106.406 |
| 773 | CATAGTCCTCCTACGACTATG | 832 | HSPPTTM | 2049 | 106.376 |
| 774 | GGCCAATGGACAACAGGGACA | 833 | GQWTTGT | 2050 | 106.357 |
| 775 | GACGGTATGAACGGAGTGGGT | 834 | DGMNGVG | 2051 | 106.317 |
| 776 | CTTCATACTGTTGCGAATGAG | 835 | LHTVANE | 2052 | 106.312 |
| 777 | TATACGTCGCAGACGTCTACG | 836 | YTSQTST | 2053 | 106.2842 |
| 778 | AACTTCTCCGAAATGTCCACA | 837 | NFSEMST | 2054 | 106.27 |
| 779 | ATTAATATTCGTAGTGATTTG | 838 | INIRSDL | 2055 | 106.266 |
| 780 | CCCTCCAACAGTGAAAGATTC | 839 | PSNSERF | 2056 | 106.249 |
| 781 | TATACGAATTATGGGGATCTT | 840 | YTNYGDL | 2057 | 106.241 |
| 782 | GATAAGAGTACGGCGCAGGCG | 841 | DKSTAQA | 2058 | 106.238 |
| 783 | CACACCGACATGGTATCCTCT | 842 | HTDMVSS | 2059 | 106.222 |
| 784 | AACAAAAGTCTGTCAATGGAC | 843 | NKSLSMD | 2060 | 106.196 |
| 785 | GGGCACTACGCTACAAACACA | 844 | GHYATNT | 2061 | 106.158 |
| 786 | GTCATCGTATCTACAAAATCA | 845 | VIVSTKS | 2062 | 106.124 |
| 787 | ACTCATAGTCTTATGAATGAT | 846 | THSLMND | 2063 | 106.116 |
| 788 | AACTACCACGGAGACAACGTT | 847 | NYHGDNV | 2064 | 106.106 |
| 789 | CGTGATGATCAGCAGCTTGAT | 848 | RDDQQLD | 2065 | 106.064 |
| 790 | GATGATAAGACTGGTCGGTAT | 849 | DDKTGRY | 2066 | 106.055 |
| 791 | GGGTCGAGCCAACACCACGAA | 850 | GSSQHHE | 2067 | 106.042 |
| 792 | CGTGTTACAGGTGTCTCAACA | 851 | RVTGVST | 2068 | 106.017 |
| 793 | AGTACTGCGTCGGGGCATACT | 852 | STASGHT | 2069 | 106.007 |
| 794 | ACTAACAACCTCTCATACGAA | 853 | TNNLSYE | 2070 | 105.998 |
| 795 | CAGCATAATAGTGCGTCGGCG | 854 | QHNSASA | 2071 | 105.987 |
| 796 | CCGGCTAAGGGTTTTGGTCAT | 855 | PAKGFGH | 2072 | 105.9781 |
| 797 | TGGTACGAAACAATCAGCCCG | 856 | WYETISP | 2073 | 105.959 |
| 798 | ACGGATGCTACGGGGAGGCAT | 857 | TDATGRH | 2074 | 105.942 |
| 799 | ATTCAGGCGAAGAATTCTGAG | 858 | IQAKNSE | 2075 | 105.939 |
| 800 | AGTACTGAGACTAGGGGTGGG | 859 | STETRGG | 2076 | 105.926 |
| 801 | TTCTCAACAAACTCTGTAATC | 860 | FSTNSVI | 2077 | 105.918 |
| 802 | TCTAACCTTCGAAACACAATA | 861 | SNLRNTI | 2078 | 105.854 |
| 803 | GGGATGATCGGGCACAACGCA | 862 | GMIGHNA | 2079 | 105.832 |
| 804 | TCTGGCCAAGGATTCTCGGCA | 863 | SGQGFSA | 2080 | 105.831 |
| 805 | ACCCACAACTCTACAGGCCTT | 864 | THNSTGL | 2081 | 105.802 |
| 806 | AGGATTGATAGTGCTATGGTG | 865 | RIDSAMV | 2082 | 105.8 |
| 807 | GTCGCTATGGGAGGCGGTCCC | 866 | VAMGGGP | 2083 | 105.795 |
| 808 | GGCTCTCACAACGGCCCAGCC | 867 | GSHNGPA | 2084 | 105.763 |
| 809 | CACTCCGCAGCGGGTGACGGT | 868 | HSAAGDG | 2085 | 105.73 |
| 810 | GCACAAGGCATAACCCACGCT | 869 | AQGITHA | 2086 | 105.711 |
| 811 | TCTGCGCTTTTGCGGATGGAT | 870 | SALLRMD | 2087 | 105.707 |
| 812 | TGGCAAATGGGGGCCGGGAGC | 871 | WQMGAGS | 2088 | 105.698 |
| 813 | ATAGACTCGCACGCCAGCATA | 872 | IDSHASI | 2089 | 105.695 |
| 814 | AGCCTAGACCACGCCCCTCTA | 873 | SLDHAPL | 2090 | 105.661 |
| 815 | GAAAACAACATGCAACACGGC | 874 | ENNMQHG | 2091 | 105.651 |
| 816 | AAGGGTGCGCAGGGTGTTCAG | 875 | KGAQGVQ | 2092 | 105.646 |
| 817 | GTCGCTGTATCGAACACTCCA | 876 | VAVSNTP | 2093 | 105.643 |
| 818 | GTTGAGTCTTCTTATTCTCGG | 877 | VESSYSR | 2094 | 105.633 |
| 819 | CATAATACGGAGTCTAAGACT | 878 | HNTESKT | 2095 | 105.625 |
| 820 | AATGAGAGTACGAAGGAGAGT | 879 | NESTKES | 2096 | 105.599 |
| 821 | GATGTTTATCTTAAGAGTCCG | 880 | DVYLKSP | 2097 | 105.586 |
| 822 | CAGTCGGGGGCTAGGACTCTG | 881 | QSGARTL | 2098 | 105.5854 |
| 823 | TCGAACAGTCAAGTACACAAC | 882 | SNSQVHN | 2099 | 105.573 |
| 824 | GTAGTCTCATCGGGCGGCTGG | 883 | WSSGGW | 2100 | 105.551 |
| 825 | CCATCAAGTTTCAACAGCGCC | 884 | PSSFNSA | 2101 | 105.542 |
| 826 | AAGCAGACTGATAGTAGGGGT | 885 | KQTDSRG | 2102 | 105.5 |
| 827 | AACACAACGCCACCTAACCAC | 886 | NTTPPNH | 2103 | 105.483 |
| 828 | CAAAACGGAACCTCGTCTATA | 887 | QNGTSSI | 2104 | 105.483 |
| 829 | CTCATGAAAGACATGGAATCC | 888 | LMKDMES | 2105 | 105.458 |
| 830 | ACTCAGACTGGTCATGTTTCT | 889 | TQTGHVS | 2106 | 105.4558 |
| 831 | GAAATACACACGACCACAGGC | 890 | EIHTTTG | 2107 | 105.449 |
| 832 | ATACAAACTACTACAAAATGC | 891 | IQTTTKC | 2108 | 105.442 |
| 833 | CCCGCTGAAGGAAACAACCGT | 892 | PAEGNNR | 2109 | 105.442 |
| 834 | TACATCGCCGGAGGGGAACAA | 893 | YIAGGEQ | 2110 | 105.415 |
| 835 | GAAGTACGCGACCAAAAAACA | 894 | EVRDQKT | 2111 | 105.375 |
| 836 | TACGCCGTCGCGATAGGCACA | 895 | YAVAIGT | 2112 | 105.366 |
| 837 | TCCGCTAACGAACACAACCAC | 896 | SANEHNH | 2113 | 105.337 |
| 838 | GGGATGAGGGATACGCCGCCG | 897 | GMRDTPP | 2114 | 105.322 |
| 839 | GCTCAGCAGATTGTTAATGGG | 898 | AQQIVNG | 2115 | 105.321 |
| 840 | TCAAGTTCCCAAACGGTTTTG | 899 | SSSQTVL | 2116 | 105.321 |
| 841 | GTTATTCAGTCTGATAATACG | 900 | VIQSDNT | 2117 | 105.32 |
| 842 | GTTCCGGCGCATTCTCGGGGT | 901 | VPAHSRG | 2118 | 105.305 |
| 843 | TCGAATACGGGGTCGTTGGGT | 902 | SNTGSLG | 2119 | 105.2779 |
| 844 | TGGGCCAAAGACGTCAACGTC | 903 | WAKDVNV | 2120 | 105.273 |
| 845 | AATGTGTTGGGTGCTTCGAGT | 904 | NVLGASS | 2121 | 105.187 |
| 846 | ACTCCGGAGGCTAGTGCGCGT | 905 | TPEASAR | 2122 | 105.173 |
| 847 | AATTATAATGGGGTTAATGTG | 906 | NYNGVNV | 2123 | 105.152 |
| 848 | AACACAACCGGTAGCTCGGGC | 907 | NTTGSSG | 2124 | 105.145 |
| 849 | TCCAGCGGCCAACCGCTCGTC | 908 | SSGQPLV | 2125 | 105.136 |
| 850 | CAGGCGGGGGGTGTGGCGAGT | 909 | QAGGVAS | 2126 | 105.133 |
| 851 | CCGCTTCAATCCCAATCGGGA | 910 | PLQSQSG | 2127 | 105.133 |
| 852 | CAACGTACCTCGGAAGCGCCA | 911 | QRTSEAP | 2128 | 105.128 |
| 853 | TTGGCTAAGACGGTTGCGATT | 912 | LAKTVAI | 2129 | 105.1155 |
| 854 | ACCCACACCCTTGGGGGAACA | 913 | THTLGGT | 2130 | 105.08 |
| 855 | CACGACTACAGTATGAACGCG | 914 | HDYSMNA | 2131 | 105.079 |
| 856 | GGGAAACCTGCGGAAGCGCCG | 915 | GKPAEAP | 2132 | 105.055 |
| 857 | AGAAACGAAAACGTAAACGCT | 916 | RNENVNA | 2133 | 105.051 |
| 858 | AGTTCTCGGGAGGCGAAGTTT | 917 | SSREAKF | 2134 | 105.0379 |
| 859 | TCTTCTTCTGATAGTCCGCGT | 918 | SSSDSPR | 2135 | 105.035 |
| 860 | ATGAATACGACTTATAATGAG | 919 | MNTTYNE | 2136 | 105.031 |
| 861 | GTAAGGAGTGGAATAAAACCA | 920 | VRSGIKP | 2137 | 105.008 |
| 862 | CAGGAGAATCCTATGAAGATG | 921 | QENPMKM | 2138 | 104.926 |
| 863 | ACTGAGCCGCTTCCGATGTCT | 922 | TEPLPMS | 2139 | 104.869 |
| 864 | CGCCACGGGGACACACCGATG | 923 | RHGDTPM | 2140 | 104.844 |
| 865 | GCGGTGAATACGTATAATAGT | 924 | AVNTYNS | 2141 | 104.82 |
| 866 | GCGTCGACTGAGTCTCATGTG | 925 | ASTESHV | 2142 | 104.816 |
| 867 | ACAAACCTAAGTCAATCGGCC | 926 | TNLSQSA | 2143 | 104.791 |
| 868 | GAGCTGTCTACTCCTATGGTT | 927 | ELSTPMV | 2144 | 104.783 |
| 869 | TATGCGCATCCTGTGACTCAT | 928 | YAHPVTH | 2145 | 104.76 |
| 870 | CGGGGGTCTACTGGTACGCAG | 929 | RGSTGTQ | 2146 | 104.749 |
| 871 | TGTGTTGGTTCGTGTGGTGTG | 930 | CVGSCGV | 2147 | 104.738 |
| 872 | TCGGTTGCTAAGGATCAGACG | 931 | SVAKDQT | 2148 | 104.736 |
| 873 | ACGAATCTTTCTCCTAAGACG | 932 | TNLSPKT | 2149 | 104.6855 |
| 874 | CTAGGTTTCACACCCCAACCG | 933 | LGFTPQP | 2150 | 104.677 |
| 875 | AATATTAGTAGTATTAATCAG | 934 | NISSINQ | 2151 | 104.657 |
| 876 | GTTTACGACAACGTTTCTTCT | 935 | VYDNVSS | 2152 | 104.657 |
| 877 | AGTGGAAAACAAGACAAATAC | 936 | SGKQDKY | 2153 | 104.654 |
| 878 | AGACTTACAGAACTGGTCATA | 937 | RLTELVI | 2154 | 104.651 |
| 879 | CATAAGAGTGAGAGTCATAAT | 938 | HKSESHN | 2155 | 104.626 |
| 880 | GAGGCGACTCATGGTTCTTAT | 939 | EATHGSY | 2156 | 104.613 |
| 881 | AACCTACTTGTCGACCAACGT | 940 | NLLVDQR | 2157 | 104.579 |
| 882 | AATATTAATGATACTAAGAAT | 941 | NINDTKN | 2158 | 104.522 |
| 883 | CTTGCGGTTACGAATGTGCGG | 942 | LAVTNVR | 2159 | 104.498 |
| 884 | CCGTCGACACTCGCTGAAACA | 943 | PSTLAET | 2160 | 104.449 |
| 885 | CCGAAGCCTGGGACGGGGGAG | 944 | PKPGTGE | 2161 | 104.427 |
| 886 | GTGCTGTTGCAGAATTCTCAT | 945 | VLLQNSH | 2162 | 104.416 |
| 887 | TACGGTAACGCGAACACCGTA | 946 | YGNANTV | 2163 | 104.386 |
| 888 | ACATCTGGAGTTCTGACACGC | 947 | TSGVLTR | 2164 | 104.375 |
| 889 | AAAATAACGGAAACCAACCTC | 948 | KITETNL | 2165 | 104.359 |
| 890 | GTTCGCAGAGACGAAACACCT | 949 | VRRDETP | 2166 | 104.359 |
| 891 | TCTAAAATGTCAAACCCAGTG | 950 | SKMSNPV | 2167 | 104.352 |
| 892 | TGGGAATCCCTCTCCAACGCA | 951 | WESLSNA | 2168 | 104.349 |
| 893 | GCCAACGGAGGAGGATACCCC | 952 | ANGGGYP | 2169 | 104.34 |
| 894 | ATGTTGGCTTCTCGGGTGCCT | 953 | MLASRVP | 2170 | 104.336 |
| 895 | TGCGGCCTGAACTGCGGTAAA | 954 | CGLNCGK | 2171 | 104.331 |
| 896 | ACTATTACTAGTCCGTCGGTG | 955 | TITSPSV | 2172 | 104.3055 |
| 897 | TGGTCGAATGCTCAGAGTCCG | 956 | WSNAQSP | 2173 | 104.288 |
| 898 | ACAGAAAGCCCCAAACTACTA | 957 | TESPKLL | 2174 | 104.283 |
| 899 | CATTTGGTTACTAGTGGTATT | 958 | HLVTSGI | 2175 | 104.273 |
| 900 | CCTCCTAAGTCGGATTCGAAT | 959 | PPKSDSN | 2176 | 104.265 |
| 901 | ATTGCGGTGCATGTGCTGAGT | 960 | IAVHVLS | 2177 | 104.254 |
| 902 | ACTGGTACTGCGACTTTGCCT | 961 | TGTATLP | 2178 | 104.254 |
| 903 | AATACTACTCCGCCTAATCAT | 962 | NTTPPNH | 2179 | 104.232 |
| 904 | TGCACCGCCACAAAATGCTCA | 963 | CTATKCS | 2180 | 104.23 |
| 905 | CACAGTGACATGGTCAGCGGC | 964 | HSDMVSG | 2181 | 104.208 |
| 906 | CCAAACGCACACCACCTGCCC | 965 | PNAHHLP | 2182 | 104.2 |
| 907 | TCTAATAATATGAATCAGGCG | 966 | SNNMNQA | 2183 | 104.187 |
| 908 | AGTGATAATAATAGGGCTAAT | 967 | SDNNRAN | 2184 | 104.1865 |
| 909 | TTGCAGACGCCTGGGACGACG | 968 | LQTPGTT | 2185 | 104.169 |
| 910 | GTGCGCGGCGTTCAAGACGCC | 969 | VRGVQDA | 2186 | 104.167 |
| 911 | TCTCTAGACTCGCGCTCCTCG | 970 | SLDSRSS | 2187 | 104.14 |
| 912 | GTTTGTGTTACTACTTGTGCT | 971 | VCVTTCA | 2188 | 104.137 |
| 913 | CCGAATACTAATCATCTTGTG | 972 | PNTNHLV | 2189 | 104.121 |
| 914 | CTCATGTCAGGGAAAGAAAAC | 973 | LMSGKEN | 2190 | 104.109 |
| 915 | ACTTCTGCTAGTGAGAATTGG | 974 | TSASENW | 2191 | 104.108 |
| 916 | TTTTTGCCGCAGCTGGGGCAG | 975 | FLPQLGQ | 2192 | 104.094 |
| 917 | CCTTTTAATCCTGGGAATGTG | 976 | PFNPGNV | 2193 | 104.0922 |
| 918 | GGGACACCTGGTCAAAGTATA | 977 | GTPGQSI | 2194 | 104.092 |
| 919 | TATAATAATGGTGGGCATGTT | 978 | YNNGGHV | 2195 | 104.085 |
| 920 | CTCGGAAACCACTACACACCC | 979 | LGNHYTP | 2196 | 104.064 |
| 921 | CAAGTCAACCAACCGAGAATA | 980 | QVNQPRI | 2197 | 104.061 |
| 922 | TTAGGAAACAACCGGCCACTA | 981 | LGNNRPL | 2198 | 104.06 |
| 923 | CCTCCGGAAAGTGCCAGGGGC | 982 | PPESARG | 2199 | 104.023 |
| 924 | AAATCTGTAGGCGACGGGAGA | 983 | KSVGDGR | 2200 | 104.0009 |
| 925 | TCACTTCGGACGGACGAATTC | 984 | SLRTDEF | 2201 | 103.997 |
| 926 | AGTACTACTAATGTTGCGTAT | 985 | STTNVAY | 2202 | 103.987 |
| 927 | AGGATGTCGGATCCTAGTGAT | 986 | RMSDPSD | 2203 | 103.981 |
| 928 | AGTCTGTCTATTACTTCGGCG | 987 | SLSITSA | 2204 | 103.963 |
| 929 | GAAAGTGCCACATCTCTAAAA | 988 | ESATSLK | 2205 | 103.954 |
| 930 | TACACTGACGGAAGAAACACC | 989 | YTDGRNT | 2206 | 103.949 |
| 931 | TCCATATCCAACCTGCGTACC | 990 | SISNLRT | 2207 | 103.935 |
| 932 | CAAAACGACAAATCTGACAAC | 991 | QNDKSDN | 2208 | 103.9165 |
| 933 | GGTGGAACAGGTCTTTCCAAA | 992 | GGTGLSK | 2209 | 103.916 |
| 934 | AGTCAGGCTCAGATTCGTGTT | 993 | SQAQIRV | 2210 | 103.915 |
| 935 | GGTTTGATGGCGCATGTGACT | 994 | GLMAHVT | 2211 | 103.877 |
| 936 | CTGGTTGTTTCGAATAGTCTG | 995 | LWSNSL | 2212 | 103.865 |
| 937 | CATGATTCTGTGAATACGGCG | 996 | HDSVNTA | 2213 | 103.8588 |
| 938 | ACTCTTGCGAAGGATGGGAAT | 997 | TLAKDGN | 2214 | 103.842 |
| 939 | TCCGACGGATCGAAACTACTA | 998 | SDGSKLL | 2215 | 103.829 |
| 940 | ATAGACAAAACGTTCTCGGTC | 999 | IDKTFSV | 2216 | 103.812 |
| 941 | CGGCTGGTTAACATCGACCAC | 1000 | RLVNIDH | 2217 | 103.8026 |
| 942 | AAAAACTACGACAGTGACTCA | 1001 | KNYDSDS | 2218 | 103.794 |
| 943 | AGTACGCAGAGTACTAATCCG | 1002 | STQSTNP | 2219 | 103.7868 |
| 944 | CAAATATCACTACAACTCGGC | 1003 | QISLQLG | 2220 | 103.77 |
| 945 | TCCGAACCCCTTAGAGTTGGA | 1004 | SEPLRVG | 2221 | 103.749 |
| 946 | AGTCGTCTGCAGACTCAGCAG | 1005 | SRLQTQQ | 2222 | 103.7406 |
| 947 | GAAGGTTCACAAGGAAACCAC | 1006 | EGSQGNH | 2223 | 103.739 |
| 948 | CGTTCTGACCTTACTGAAAGT | 1007 | RSDLTES | 2224 | 103.736 |
| 949 | CATACTGGTGTTCAGACTAAT | 1008 | HTGVQTN | 2225 | 103.724 |
| 950 | GAGTTGGATCATCTTTCGCAT | 1009 | ELDHLSH | 2226 | 103.714 |
| 951 | GTTACTGGTGTTGATTATGCG | 1010 | VTGVDYA | 2227 | 103.713 |
| 952 | GGCGGCGCACACACTCGTGTA | 1011 | GGAHTRV | 2228 | 103.676 |
| 953 | GCCTACGGTATACACGAAGTG | 1012 | AYGIHEV | 2229 | 103.653 |
| 954 | GCGATGCTGCGTATGGAGCAG | 1013 | AMLRMEQ | 2230 | 103.652 |
| 955 | AGGCAGGCGAATCAGACGTAT | 1014 | RQANQTY | 2231 | 103.652 |
| 956 | TTTTCTGGTCAGGCGTTGGCT | 1015 | FSGQALA | 2232 | 103.646 |
| 957 | GATAATGTGAATTCTCAGCCT | 1016 | DNVNSQP | 2233 | 103.646 |
| 958 | GGGTTGCATGGGACGAGTAAT | 1017 | GLHGTSN | 2234 | 103.633 |
| 959 | GAGAGGGAGCCTCCTAAGAAT | 1018 | EREPPKN | 2235 | 103.621 |
| 960 | GTGGTGACGCTTGGGATGCTG | 1019 | VVTLGML | 2236 | 103.619 |
| 961 | CATAATAATAATTTGCTGAAT | 1020 | HNNNLLN | 2237 | 103.612 |
| 962 | TTGATTAATATGAGTCAGAAT | 1021 | LINMSQN | 2238 | 103.6 |
| 963 | AATACTAATGCGTCGTATTCT | 1022 | NTNASYS | 2239 | 103.599 |
| 964 | AGGCTTAATGCGGGTGAGCAT | 1023 | RLNAGEH | 2240 | 103.594 |
| 965 | GCTGTTATTCTGAATCCTGTT | 1024 | AVILNPV | 2241 | 103.576 |
| 966 | CCGAGTACTCATGGGTATGTT | 1025 | PSTHGYV | 2242 | 103.571 |
| 967 | CTTAGGGCGTCTGTGTCGGAG | 1026 | LRASVSE | 2243 | 103.564 |
| 968 | ATGATGACCTCTATGACGTTA | 1027 | MMTSMTL | 2244 | 103.561 |
| 969 | TCGGCACACAACATAGTATAC | 1028 | SAHNIVY | 2245 | 103.556 |
| 970 | CACGACAGCACAACCCGCCCA | 1029 | HDSTTRP | 2246 | 103.545 |
| 971 | ATCAAAGACTCGTACCTTACT | 1030 | IKDSYLT | 2247 | 103.542 |
| 972 | TATACGCCTGGGCTTACTGAG | 1031 | YTPGLTE | 2248 | 103.541 |
| 973 | AAGATGGGTGGTTCTCAGAGT | 1032 | KMGGSQS | 2249 | 103.477 |
| 974 | TCACGTCAAACAGCGCTAACA | 1033 | SRQTALT | 2250 | 103.4599 |
| 975 | GTAGAAACCAGCAGATTGTAC | 1034 | VETSRLY | 2251 | 103.45 |
| 976 | AAATCCAACAACGGGGAATAC | 1035 | KSNNGEY | 2252 | 103.424 |
| 977 | TCGGGTGTTCATAGTGCGCGT | 1036 | SGVHSAR | 2253 | 103.3881 |
| 978 | CCTAACAACGAAAAAAACCCG | 1037 | PNNEKNP | 2254 | 103.326 |
| 979 | ACTATTGGTGAGGGGTATCAT | 1038 | TIGEGYH | 2255 | 103.325 |
| 980 | CTGCAGACTTCTGTTGCTACT | 1039 | LQTSVAT | 2256 | 103.316 |
| 981 | CTATTGGGAAACGCACCCACA | 1040 | LLGNAPT | 2257 | 103.308 |
| 982 | ATTTCGGGGTCTCATTTGAAT | 1041 | ISGSHLN | 2258 | 103.297 |
| 983 | AAGTCTCTTAGTAGTGATGAT | 1042 | KSLSSDD | 2259 | 103.285 |
| 984 | ACGAGGACTCAGGGGACGTCT | 1043 | TRTQGTS | 2260 | 103.2635 |
| 985 | GTTAGTAGGTCTGGGAGTACT | 1044 | VSRSGST | 2261 | 103.257 |
| 986 | AGCGCCGACACCCGGTCCCCC | 1045 | SADTRSP | 2262 | 103.242 |
| 987 | CGTGATACTGCTAATGGGCCG | 1046 | RDTANGP | 2263 | 103.2389 |
| 988 | ATGATGTCTAACAGCCTCGCG | 1047 | MMSNSLA | 2264 | 103.232 |
| 989 | ACTGGGAGGATTGAGCTTAGG | 1048 | TGRIELR | 2265 | 103.214 |
| 990 | GCTAATAATGCGGCTGCGTCG | 1049 | ANNAAAS | 2266 | 103.209 |
| 991 | CAGTTGAATATTAATGATAAG | 1050 | QLNINDK | 2267 | 103.208 |
| 992 | ATGGACGGGGCTCACACGTCA | 1051 | MDGAHTS | 2268 | 103.202 |
| 993 | ACTAGTGCGACTGATTCGATG | 1052 | TSATDSM | 2269 | 103.197 |
| 994 | GCCGCCAGCTTGTCGCAAAGC | 1053 | AASLSQS | 2270 | 103.152 |
| 995 | TCTCAGGCGGGTCTGCTTGTG | 1054 | SQAGLLV | 2271 | 103.116 |
| 996 | ACGACTTATTCGGATCTGAGT | 1055 | TTYSDLS | 2272 | 103.104 |
| 997 | TTCTCCTCCGGAACAACCATA | 1056 | FSSGTTI | 2273 | 103.102 |
| 998 | GTCTTCACAGAAATAGAATCG | 1057 | VFTEIES | 2274 | 103.101 |
| 999 | GCAGACCCCGCTAAAGGCAAA | 1058 | ADPAKGK | 2275 | 103.083 |
| 1000 | AAAGAATCTGAATACAGAGTT | 1059 | KESEYRV | 2276 | 103.07 |
| 1001 | GGGATGGTGTCTCTTAATAGG | 1060 | GMVSLNR | 2277 | 103.06 |
| 1002 | ACCGTTATCGAACGCAAAGAC | 1061 | TVIERKD | 2278 | 103.0575 |
| 1003 | AGGATTGATACGTTGTTGGTG | 1062 | RIDTLLV | 2279 | 103.055 |
| 1004 | GGATCCACAGGCCTACCCCCG | 1063 | GSTGLPP | 2280 | 103.047 |
| 1005 | ATGGAGTTGACTTCTACTAGT | 1064 | MELTSTS | 2281 | 103.026 |
| 1006 | CAACCAGGAGCCCCCCAAACC | 1065 | QPGAPQT | 2282 | 103.014 |
| 1007 | AATTCGATGGGTAATGGGGGT | 1066 | NSMGNGG | 2283 | 103.009 |
| 1008 | GGTAGTACTAAGTCTGGGCAG | 1067 | GSTKSGQ | 2284 | 103.0049 |
| 1009 | ACTTTTTTGCCTCAGCTTGGG | 1068 | TFLPQLG | 2285 | 102.994 |
| 1010 | ATGGGAATAAACGTACTGAGC | 1069 | MGINVLS | 2286 | 102.986 |
| 1011 | GTGAATCTTGGTATTTCGGGG | 1070 | VNLGISG | 2287 | 102.985 |
| 1012 | AGTGAGAATCGGGCTGGTAAT | 1071 | SENRAGN | 2288 | 102.945 |
| 1013 | CACTCCAACGCGACTACGATA | 1072 | HSNATTI | 2289 | 102.916 |
| 1014 | CCGGGGTCGTCCGCTTCCATC | 1073 | PGSSASI | 2290 | 102.914 |
| 1015 | ATTACGTCGTTGAATGGGATG | 1074 | ITSLNGM | 2291 | 102.909 |
| 1016 | TATCTGGAGGGTGCTCATCGT | 1075 | YLEGAHR | 2292 | 102.896 |
| 1017 | AGGCAGGTTGAGCAGTCTGAT | 1076 | RQVEQSD | 2293 | 102.889 |
| 1018 | AGCTCTCAAAGTTCCGGGTCG | 1077 | SSQSSGS | 2294 | 102.8836 |
| 1019 | CAGCTTACTGTTGGGAAGCCG | 1078 | QLTVGKP | 2295 | 102.8762 |
| 1020 | GTTGTGCATTCGAGTATTACT | 1079 | WHSSIT | 2296 | 102.8257 |
| 1021 | CTAGAACAACTACGGGTCCCA | 1080 | LEQLRVP | 2297 | 102.815 |
| 1022 | CAGCATTCTCCGAAGCCGGTT | 1081 | QHSPKPV | 2298 | 102.81 |
| 1023 | GCGGGCAGTTCGCCATCACGC | 1082 | AGSSPSR | 2299 | 102.8035 |
| 1024 | GGAGTAACAATCGGTAGCAGG | 1083 | GVTIGSR | 2300 | 102.7752 |
| 1025 | TACATCGCGGGAGGCGACCAA | 1084 | YIAGGDQ | 2301 | 102.75 |
| 1026 | ATTAGTAGTGAGAGGTTTTCT | 1085 | ISSERFS | 2302 | 102.729 |
| 1027 | AGGAGTGAGGGTAATCATGCT | 1086 | RSEGNHA | 2303 | 102.719 |
| 1028 | GAGAAGGGGAATAGTGGGGTT | 1087 | EKGNSGV | 2304 | 102.71 |
| 1029 | TACATAGTTGACCACGCTAAC | 1088 | YIVDHAN | 2305 | 102.71 |
| 1030 | CGTCGGTTGAGTACGGATCTT | 1089 | RRLSTDL | 2306 | 102.702 |
| 1031 | GCGAATAGTAGGCTTGGGGCG | 1090 | ANSRLGA | 2307 | 102.6979 |
| 1032 | GGTACTGCTGAGAATACGAGT | 1091 | GTAENTS | 2308 | 102.696 |
| 1033 | GTGAGGGATGTTGCTAAGGAG | 1092 | VRDVAKE | 2309 | 102.691 |
| 1034 | GGAGGCCTTACCAACGGTCTA | 1093 | GGLTNGL | 2310 | 102.67 |
| 1035 | CCTTCGATTCCGTCGTTTTCG | 1094 | PSIPSFS | 2311 | 102.657 |
| 1036 | AACGCTCTCCTCAACGCACCT | 1095 | NALLNAP | 2312 | 102.628 |
| 1037 | GACGACATGGTCAAAAACTCA | 1096 | DDMVKNS | 2313 | 102.623 |
| 1038 | ACTGCGAATACGCATGCTCTG | 1097 | TANTHAL | 2314 | 102.613 |
| 1039 | GTATACGCCACCGCACTCGCA | 1098 | VYATALA | 2315 | 102.611 |
| 1040 | GGTATATACCCGGCATCCACC | 1099 | GIYPAST | 2316 | 102.61 |
| 1041 | GGTTTTGATGGTAAGCAGCTT | 1100 | GFDGKQL | 2317 | 102.606 |
| 1042 | CACTCTATGTCCGCAAACACC | 1101 | HSMSANT | 2318 | 102.605 |
| 1043 | TGGAGCATCAAAAACCAAACA | 1102 | WSIKNQT | 2319 | 102.586 |
| 1044 | ACCCTCCACACCAAAGACCTA | 1103 | TLHTKDL | 2320 | 102.57 |
| 1045 | TCTTATGGTAATACTCATGAT | 1104 | SYGNTHD | 2321 | 102.566 |
| 1046 | CAGTCGGGGTCTCTGGTGCCG | 1105 | QSGSLVP | 2322 | 102.552 |
| 1047 | AATACTTTGCAGAATAGTCAT | 1106 | NTLQNSH | 2323 | 102.5506 |
| 1048 | ACGGCTGAGTCTAGTCATCCG | 1107 | TAESSHP | 2324 | 102.548 |
| 1049 | GCCTCTACAGTCTCACTCTAC | 1108 | ASTVSLY | 2325 | 102.547 |
| 1050 | CTGACTGCTGTTGCGATTAGT | 1109 | LTAVAIS | 2326 | 102.542 |
| 1051 | GTCTCGGGACAAAGTGCGTAC | 1110 | VSGQSAY | 2327 | 102.541 |
| 1052 | GGTGAAACTAACTTCCCAACT | 1111 | GETNFPT | 2328 | 102.532 |
| 1053 | AATGATAATAGGTCGATGAAT | 1112 | NDNRSMN | 2329 | 102.526 |
| 1054 | CGATCAGGCGACCCTAAAAAC | 1113 | RSGDPKN | 2330 | 102.519 |
| 1055 | TGGGAGAGTGATAAGTTTCGT | 1114 | WESDKFR | 2331 | 102.514 |
| 1056 | CAGGTTAATCATAATACTAGT | 1115 | QVNHNTS | 2332 | 102.514 |
| 1057 | GGGTGGTCGAACAACGAACTA | 1116 | GWSNNEL | 2333 | 102.507 |
| 1058 | CGGGCTGTGCTTGCGACTAAT | 1117 | RAVLATN | 2334 | 102.49 |
| 1059 | CATATGGGTTTGAATGAGCTT | 1118 | HMGLNEL | 2335 | 102.484 |
| 1060 | GGAGAAAGCTCCTCAATAAGC | 1119 | GESSSIS | 2336 | 102.477 |
| 1061 | ATACACAAATCTAGCGTCGAA | 1120 | IHKSSVE | 2337 | 102.473 |
| 1062 | ATGTCCGGATCCATGATATCA | 1121 | MSGSMIS | 2338 | 102.463 |
| 1063 | TTGAGTCTGGCTGGGAATAGG | 1122 | LSLAGNR | 2339 | 102.448 |
| 1064 | TCTGCAACAACGAACCACGGA | 1123 | SATTNHG | 2340 | 102.441 |
| 1065 | TCTACGGAGTCTAATGCTAGT | 1124 | STESNAS | 2341 | 102.43 |
| 1066 | CCGATTGCTGAGAGGCCTTCT | 1125 | PIAERPS | 2342 | 102.428 |
| 1067 | TTACTTCCAAACAACACCCAC | 1126 | LLPNNTH | 2343 | 102.424 |
| 1068 | GGGACTCTTAAGAAGGATGCG | 1127 | GTLKKDA | 2344 | 102.412 |
| 1069 | GCTCTTGAGAATCGGAGTCTG | 1128 | ALENRSL | 2345 | 102.408 |
| 1070 | ACCACCGGGAACTCCACGATG | 1129 | TTGNSTM | 2346 | 102.383 |
| 1071 | GTGTATGATAGTGCGCCTAAT | 1130 | VYDSAPN | 2347 | 102.366 |
| 1072 | CTACTATCTAAAGGGGACTCC | 1131 | LLSKGDS | 2348 | 102.346 |
| 1073 | TCTTACGCCATAAACCAATCA | 1132 | SYAINQS | 2349 | 102.335 |
| 1074 | GGAGGAGGGGAACGTTCCACG | 1133 | GGGERST | 2350 | 102.323 |
| 1075 | ATTCAGGTTAGTGGTAGTCAG | 1134 | IQVSGSQ | 2351 | 102.315 |
| 1076 | TATCCTGTTTCGCTTTCGCCG | 1135 | YPVSLSP | 2352 | 102.312 |
| 1077 | GAGTTGGGTAATAAGACGGCT | 1136 | ELGNKTA | 2353 | 102.311 |
| 1078 | TCGGGGGTAAACTTCGGAGTA | 1137 | SGVNFGV | 2354 | 102.287 |
| 1079 | GCGTGGAGTTCGCCGAGTGGG | 1138 | AWSSPSG | 2355 | 102.285 |
| 1080 | GGTGTGAATTATCATACTACG | 1139 | GVNYHTT | 2356 | 102.261 |
| 1081 | CTGATTGGGGAGCTTAAGATG | 1140 | LIGELKM | 2357 | 102.255 |
| 1082 | TATCTGAATAGTAAGCAGCTT | 1141 | YLNSKQL | 2358 | 102.212 |
| 1083 | ACTGTTGATAGGCCGATTGTG | 1142 | TVDRPIV | 2359 | 102.191 |
| 1084 | GTCAGCAAAACCAAAGACTCG | 1143 | VSKTKDS | 2360 | 102.184 |
| 1085 | CAAGCTGGGAACGCGCCAAGG | 1144 | QAGNAPR | 2361 | 102.1806 |
| 1086 | CAAGACCAAACGAGCAACCGT | 1145 | QDQTSNR | 2362 | 102.177 |
| 1087 | GATACTACGTATCGGAATACT | 1146 | DTTYRNT | 2363 | 102.173 |
| 1088 | GGGACAACCGAAGTTAACAAA | 1147 | GTTEVNK | 2364 | 102.17 |
| 1089 | GGGTTTACTAATACGAGTAAG | 1148 | GFTNTSK | 2365 | 102.152 |
| 1090 | GTGCAGAAGAATGATGTGCTT | 1149 | VQKNDVL | 2366 | 102.14 |
| 1091 | AGCGTCAACAACATGCGACTC | 1150 | SVNNMRL | 2367 | 102.1324 |
| 1092 | TTCAGTGCCGCCTTACCGTTA | 1151 | FSAALPL | 2368 | 102.13 |
| 1093 | GACGTCCCAAACAACAAAAGG | 1152 | DVPNNKR | 2369 | 102.126 |
| 1094 | GGTGAGACTATGCGTCATAAT | 1153 | GETMRHN | 2370 | 102.119 |
| 1095 | ATTCGGACTTCTGTGATTAAT | 1154 | IRTSVIN | 2371 | 102.103 |
| 1096 | CCGCGTGCTCCTGGTCATAAT | 1155 | PRAPGHN | 2372 | 102.101 |
| 1097 | AGTGTTGCGCATCCTTTGTCT | 1156 | SVAHPLS | 2373 | 102.101 |
| 1098 | ATGACAATAACCGTCGAACCG | 1157 | MTITVEP | 2374 | 102.096 |
| 1099 | CCATTAAACGCGAACGGCTCC | 1158 | PLNANGS | 2375 | 102.094 |
| 1100 | AATAGGCAGCGGGATTTTGAG | 1159 | NRQRDFE | 2376 | 102.073 |
| 1101 | GATATTCATAATCCGCGTACG | 1160 | DIHNPRT | 2377 | 102.073 |
| 1102 | TGGATAGCAGGAAACCACTCC | 1161 | WIAGNHS | 2378 | 102.07 |
| 1103 | TCTACTCATCATGCTGATCGT | 1162 | STHHADR | 2379 | 102.069 |
| 1104 | CCGGAATCCGCCGCCAAAAGC | 1163 | PESAAKS | 2380 | 102.058 |
| 1105 | CACTCCGACAAAGTCTCCTCA | 1164 | HSDKVSS | 2381 | 102.051 |
| 1106 | TCAAACAGCGCCGACGCGGGG | 1165 | SNSADAG | 2382 | 102.047 |
| 1107 | GAGTTTCAGAGGATTCGTGAG | 1166 | EFQRIRE | 2383 | 102.039 |
| 1108 | TCCGCGGGGATGACATTGGAC | 1167 | SAGMTLD | 2384 | 102.016 |
| 1109 | ACTCAAACTTCTACCTGGACC | 1168 | TQTSTWT | 2385 | 102.009 |
| 1110 | ACGACACTAACGCAAACGGAC | 1169 | TTLTQTD | 2386 | 102.003 |
| 1111 | GCCTCGAAAGGCTTCGGCCAC | 1170 | ASKGFGH | 2387 | 101.991 |
| 1112 | CCGGCTACGATGATTAGTGAG | 1171 | PATMISE | 2388 | 101.985 |
| 1113 | ACTGACTCATCTGCAGACTCC | 1172 | TDSSADS | 2389 | 101.981 |
| 1114 | TCAACCAGAAAAGAACACGAC | 1173 | STRKEHD | 2390 | 101.98 |
| 1115 | GGTGATATTTCTTATAGGGTT | 1174 | GDISYRV | 2391 | 101.977 |
| 1116 | ATGGGGTATGTTGATAGTCTG | 1175 | MGYVDSL | 2392 | 101.953 |
| 1117 | CAAACCATCACCTCACAAATG | 1176 | QTITSQM | 2393 | 101.941 |
| 1118 | TCGATTGGGTATTCGCCTCCG | 1177 | SIGYSPP | 2394 | 101.939 |
| 1119 | TCATCCCCAGACTCGTACAGA | 1178 | SSPDSYR | 2395 | 101.921 |
| 1120 | ATTAGTCCGAGTGCTTCTAAT | 1179 | ISPSASN | 2396 | 101.855 |
| 1121 | TATCCGGCTGATCATCGGACT | 1180 | YPADHRT | 2397 | 101.85 |
| 1122 | CACACCGGCCAAACACCATCA | 1181 | HTGQTPS | 2398 | 101.837 |
| 1123 | CAGACGACTATTCTGGCTGCT | 1182 | QTTILAA | 2399 | 101.837 |
| 1124 | GATGGTACGAGGCAGGTTCAT | 1183 | DGTRQVH | 2400 | 101.836 |
| 1125 | AGGAGTAGTCCTGCGACGAAT | 1184 | RSSPATN | 2401 | 101.829 |
| 1126 | GCGATGAGTCATACGTATAAG | 1185 | AMSHTYK | 2402 | 101.813 |
| 1127 | ATGGCGGCTCCGCCGGAGCAT | 1186 | MAAPPEH | 2403 | 101.802 |
| 1128 | GGTCCTAGTACTTCGGAGGCG | 1187 | GPSTSEA | 2404 | 101.794 |
| 1129 | CATAATCATGATAGGTCGTCT | 1188 | HNHDRSS | 2405 | 101.7829 |
| 1130 | GTGGTCCCATCGACCCAAGCA | 1189 | WPSTQA | 2406 | 101.781 |
| 1131 | ATTCCTGTGACTACTCGTAAT | 1190 | IPVTTRN | 2407 | 101.722 |
| 1132 | AACCAACTCGTACGCGGGACA | 1191 | NQLVRGT | 2408 | 101.717 |
| 1133 | GGGTTTGCGCTTACGGGTACG | 1192 | GFALTGT | 2409 | 101.696 |
| 1134 | TCTAAGGGTGGTGATATGGTG | 1193 | SKGGDMV | 2410 | 101.666 |
| 1135 | GCTCGACCAGGCCAATCTATG | 1194 | ARPGQSM | 2411 | 101.6287 |
| 1136 | AAAGCAGACTACGAATCCTCC | 1195 | KADYESS | 2412 | 101.626 |
| 1137 | GGACCAAGTTCGCACATCGTT | 1196 | GPSSHIV | 2413 | 101.616 |
| 1138 | GAAGTTGTCAAAACCACGCAC | 1197 | EVVKTTH | 2414 | 101.61 |
| 1139 | ACTTTGGATAATAATCATTCT | 1198 | TLDNNHS | 2415 | 101.604 |
| 1140 | ACGATTTATAATATGGGTCCG | 1199 | TIYNMGP | 2416 | 101.599 |
| 1141 | TCTACCATGAACACGATCACG | 1200 | STMNTIT | 2417 | 101.597 |
| 1142 | ACGCTGGCGCGGACTACTGAG | 1201 | TLARTTE | 2418 | 101.581 |
| 1143 | TTGATTTCTTCGCAGACTTCT | 1202 | LISSQTS | 2419 | 101.553 |
| 1144 | CAGACTGCGTCTGGTGATACT | 1203 | QTASGDT | 2420 | 101.497 |
| 1145 | GCGCATGGTGCTTTTCCGGTT | 1204 | AHGAFPV | 2421 | 101.495 |
| 1146 | GGGGAGACGCGGTCGACTGCT | 1205 | GETRSTA | 2422 | 101.494 |
| 1147 | AACAACTACGCCTACTCCGCT | 1206 | NNYAYSA | 2423 | 101.493 |
| 1148 | GAGGCTTATCAGACTGAGAAG | 1207 | EAYQTEK | 2424 | 101.49 |
| 1149 | TCTCTAGCACACGCCGTAAGC | 1208 | SLAHAVS | 2425 | 101.485 |
| 1150 | ACGTATCAGTTGAGTGGGAAT | 1209 | TYQLSGN | 2426 | 101.452 |
| 1151 | ATGAGCGAAAGGTTGCGGATA | 1210 | MSERLRI | 2427 | 101.431 |
| 1152 | GGGTCGGGGAAAGACCCAGGG | 1211 | GSGKDPG | 2428 | 101.43 |
| 1153 | TACAACAGCAACGCTTCTGTA | 1212 | YNSNASV | 2429 | 101.428 |
| 1154 | ACGAGGGGTGATATGGAGTTT | 1213 | TRGDMEF | 2430 | 101.424 |
| 1155 | GGAATCACCGGAAGCCCCGGC | 1214 | GITGSPG | 2431 | 101.42 |
| 1156 | CAACACACCGCCCACCCCATG | 1215 | QHTAHPM | 2432 | 101.416 |
| 1157 | GATACGGCGAATCGTTCGACT | 1216 | DTANRST | 2433 | 101.407 |
| 1158 | TCGGCACACGACGCAAGACTA | 1217 | SAHDARL | 2434 | 101.387 |
| 1159 | CTTAATCATACTCTGGGGCAT | 1218 | LNHTLGH | 2435 | 101.385 |
| 1160 | GGGTTTGAGACGAGTAGTCCT | 1219 | GFETSSP | 2436 | 101.369 |
| 1161 | GGTACGAGTGCGGAGAGTCGG | 1220 | GTSAESR | 2437 | 101.366 |
| 1162 | CATGCTAATTATGTTGAGGTG | 1221 | HANYVEV | 2438 | 101.345 |
| 1163 | ACAACGAAACCGGTCGCGGAA | 1222 | TTKPVAE | 2439 | 101.338 |
| 1164 | TCGACCGCCGTTACTAACTCA | 1223 | STAVTNS | 2440 | 101.304 |
| 1165 | CTGGGGCTTGCTGGTCAGGTT | 1224 | LGLAGQV | 2441 | 101.304 |
| 1166 | GTGCTTAAGGGTACGTTTCCG | 1225 | VLKGTFP | 2442 | 101.298 |
| 1167 | ATGAATGAGCCTGGTAGGACG | 1226 | MNEPGRT | 2443 | 101.283 |
| 1168 | ACTTCTGATCCTTTGAGGAAT | 1227 | TSDPLRN | 2444 | 101.252 |
| 1169 | CGTGATACTAATACGGATAAG | 1228 | RDTNTDK | 2445 | 101.234 |
| 1170 | GAGTCTGATTTGCGTCAGCGG | 1229 | ESDLRQR | 2446 | 101.225 |
| 1171 | TCCGGAATGGCCGGCCTTTCC | 1230 | SGMAGLS | 2447 | 101.211 |
| 1172 | ATAGCAACAACGTCTGGGCGG | 1231 | IATTSGR | 2448 | 101.21 |
| 1173 | ACGATTAGGAGTGAGGGTTTT | 1232 | TIRSEGF | 2449 | 101.202 |
| 1174 | GGTCTGTCTATTACTATTGCG | 1233 | GLSITIA | 2450 | 101.176 |
| 1175 | CCGCCTACTAATGGGCGTATG | 1234 | PPTNGRM | 2451 | 101.17 |
| 1176 | CTACAAGACCGGGCAACGAAC | 1235 | LQDRATN | 2452 | 101.165 |
| 1177 | CTTAAATCGACCGGTGACCAC | 1236 | LKSTGDH | 2453 | 101.132 |
| 1178 | GATAATAATAATCAGGTTTAT | 1237 | DNNNQVY | 2454 | 101.13 |
| 1179 | GTGCATATGGAGTCGTATGCG | 1238 | VHMESYA | 2455 | 101.111 |
| 1180 | GACCAAATAGGGCACGGAACA | 1239 | DQIGHGT | 2456 | 101.106 |
| 1181 | GGGACGGGGCCGCATGGTACT | 1240 | GTGPHGT | 2457 | 101.0712 |
| 1182 | ATTGGGAATAATACTGGTCTT | 1241 | IGNNTGL | 2458 | 101.0529 |
| 1183 | TTAAACGCAGAATACACCAAC | 1242 | LNAEYTN | 2459 | 101.047 |
| 1184 | GTGACGTCGTCTGCTAGTGGT | 1243 | VTSSASG | 2460 | 101.027 |
| 1185 | ACGCATGTTGCTAAGCCTGAT | 1244 | THVAKPD | 2461 | 101.017 |
| 1186 | CCGATGAACAAAGACATACTG | 1245 | PMNKDIL | 2462 | 100.9906 |
| 1187 | CTTAGTTTGAATATGAATGAG | 1246 | LSLNMNE | 2463 | 100.99 |
| 1188 | GTCGGCAACTCAAGCACTCAC | 1247 | VGNSSTH | 2464 | 100.99 |
| 1189 | GGCCACGGAAGTGACTTGACC | 1248 | GHGSDLT | 2465 | 100.9576 |
| 1190 | CTTACACAAAACCCAACGAAC | 1249 | LTQNPTN | 2466 | 100.934 |
| 1191 | CCGAGTGATCATATGCGGACT | 1250 | PSDHMRT | 2467 | 100.8849 |
| 1192 | CCTGATAGTCGTTTGGCGGCT | 1251 | PDSRLAA | 2468 | 100.843 |
| 1193 | TGGGGTAGTGAGGGGACGATT | 1252 | WGSEGTI | 2469 | 100.84 |
| 1194 | AAACCGACAAACGACTCGTAC | 1253 | KPTNDSY | 2470 | 100.821 |
| 1195 | AACCGCGGAACAGAAGTTTAC | 1254 | NRGTEVY | 2471 | 100.8147 |
| 1196 | CACGTGATCACAACAAAAGAC | 1255 | HVITTKD | 2472 | 100.7896 |
| 1197 | ATTGTGTCTAATCCGCCGGCG | 1256 | IVSNPPA | 2473 | 100.76 |
| 1198 | ATGCGTAACGACCAACAACTT | 1257 | MRNDQQL | 2474 | 100.7503 |
| 1199 | TTTCAGCGTGATGTTGGTCAT | 1258 | FQRDVGH | 2475 | 100.7392 |
| 1200 | GCCAACGACAACACCAAACAA | 1259 | ANDNTKQ | 2476 | 100.7364 |
| 1201 | TCTGTTCCGCATGCGGGGGAT | 1260 | SVPHAGD | 2477 | 100.7276 |
| 1202 | AATGCTACTCCGCCGAATCAT | 1261 | NATPPNH | 2478 | 100.6678 |
| 1203 | TCAGAACACACATCAGTTCTA | 1262 | SEHTSVL | 2479 | 100.64 |
| 1204 | GCCATGTCCCAAACGGACATC | 1263 | AMSQTDI | 2480 | 100.628 |
| 1205 | CCTAAGGCTCCGCTTAATAAT | 1264 | PKAPLNN | 2481 | 100.627 |
| 1206 | ACCAACAACTTACTCGCACAA | 1265 | TNNLLAQ | 2482 | 100.55 |
| 1207 | CAGCGTCAGGGTTCGGGGGTT | 1266 | QRQGSGV | 2483 | 100.5318 |
| 1208 | CGCAGTGACACCACTAACGCC | 1267 | RSDTTNA | 2484 | 100.51 |
| 1209 | GAGGCTGATAAGAATGGTGTT | 1268 | EADKNGV | 2485 | 100.386 |
| 1210 | ATGCTGGGGGGTTTTGCGCAG | 1269 | MLGGFAQ | 2486 | 100.3622 |
| 1211 | ATGACACACCTCAGCACAGAC | 1270 | MTHLSTD | 2487 | 100.267 |
| 1212 | GTTTTGTCTGATAAGGCGTTT | 1271 | VLSDKAF | 2488 | 100.231 |
| 1213 | ACACCCTCCGGTACCATAAAA | 1272 | TPSGTIK | 2489 | 100.22 |
| 1214 | ATTATTCTTATGGGTCAGAGT | 1273 | IILMGQS | 2490 | 100.213 |
| 1215 | CTTTCGGGGGGTGAGACTCTT | 1274 | LSGGETL | 2491 | 100.154 |
| 1216 | ACCGACGGCGCCCTGGGTTAC | 1275 | TDGALGY | 2492 | 100.129 |
| 1217 | GGGAATAAGGCTGCGCTGACG | 1276 | GNKAALT | 2493 | 100.066 |

TABLE 2
MHCK7 Results mRNA Second Round of Capsid Variant Selection in
C57BL6 mice-score capped at 100

| Variant | | SEQ ID | | SEQ | Sum of muscle mRNA |
|---|---|---|---|---|---|
| ID | Nucleotide Sequence | NO: | aa | ID NO: | score capped at 100 |
| 1 | AGAGGAGACTTGACAACCCCA | 2494 | RGDLTTP | 3737 | 576.12 |
| 2 | CGGGGTGATCTTAATCAGTAT | 2495 | RGDLNQY | 3738 | 496.41 |
| 3 | AGGGGTGATCTTTCTACGCCT | 2496 | RGDLSTP | 3739 | 475.909 |
| 4 | CGGGGTGATCAGCTTTATCAT | 2497 | RGDQLYH | 3740 | 460.578 |
| 5 | CGAGGAGACACCATGAGCAAA | 2498 | RGDTMSK | 3741 | 439.771 |
| 6 | AGGGGGGATGCGACGGAGCTT | 2499 | RGDATEL | 3742 | 429.74 |
| 7 | AGAGGCGACTTATCCACACCC | 2500 | RGDLSTP | 3743 | 429.182 |
| 8 | CGCGGCGACATGATAAACACC | 2501 | RGDMINT | 3744 | 397.62 |
| 9 | AGGGGCGACCTGAACCAATAC | 2502 | RGDLNQY | 3745 | 388.417 |
| 10 | CGGGGGGATACTATGTCTAAG | 2503 | RGDTMSK | 3746 | 352.268 |
| 11 | CGGGGTGATCTTACTACGCCT | 2504 | RGDLTTP | 3747 | 320.042 |
| 12 | AGGGGCGACCTCAACGACAGC | 2505 | RGDLNDS | 3748 | 315.615 |
| 13 | GCAAACCCCAACATACTAGAC | 2506 | ANPNILD | 3749 | 302.02 |
| 14 | CGAGGCGACACAATGAACTAC | 2507 | RGDTMNY | 3750 | 285.332 |
| 15 | ATGAGTAATTTGGGGTATGAG | 2508 | MSNLGYE | 3751 | 270.74 |
| 16 | TACACCTCTCAAACCAGCACT | 2509 | YTSQTST | 3752 | 256.544 |
| 17 | CTCGGAGGAAACAGCAGGTTC | 2510 | LGGNSRF | 3753 | 255.425 |
| 18 | CAAAGCCAAGCGATACAACTA | 2511 | QSQAIQL | 3754 | 254.191 |
| 19 | AACACGTACACACCGGGAAAA | 2512 | NTYTPGK | 3755 | 239.565 |
| 20 | GGGGCGGAAGCGGGCCGCCAA | 2513 | GAEAGRQ | 3756 | 237.2829 |
| 21 | GAACACGCTACAGCAAAACAA | 2514 | EHATAKQ | 3757 | 236.826 |
| 22 | GCGGCACAACTCGTCAGTCCA | 2515 | AAQLVSP | 3758 | 225.034 |
| 23 | GATCAGACGGCTAGTATTGTT | 2516 | DQTASIV | 3759 | 224.832 |
| 24 | GTTCAAACCCACATAGGAGTC | 2517 | VQTHIGV | 3760 | 224.306 |
| 25 | TCTTATGGTAATACTCATGAT | 2518 | SYGNTHD | 3761 | 224.26 |
| 26 | ACCTCCACGGCTTCAAAACAA | 2519 | TSTASKQ | 3762 | 221.617 |
| 27 | TTGGTGACTCATGAGCGGATT | 2520 | LVTHERI | 3763 | 219.227 |
| 28 | ATGGATAAGTCTAATAATTCT | 2521 | MDKSNNS | 3764 | 216.638 |
| 29 | CGTGGTGATATGTCTCGTGAG | 2522 | RGDMSRE | 3765 | 214.708 |
| 30 | CGCGGTGACGTGGCAGAAATA | 2523 | RGDVAEI | 3766 | 212.967 |
| 31 | GGTGGCGAAAACAGAACCCCA | 2524 | GGENRTP | 3767 | 210.4 |
| 32 | GCTGGGCATCAGCAGCTTGCT | 2525 | AGHQQLA | 3768 | 210.1746 |
| 33 | CGTCTTAATAGTAGTATGAAT | 2526 | RLNSSMN | 3769 | 209.449 |
| 34 | TATTATGAGAAGCTTAGTGCG | 2527 | YYEKLSA | 3770 | 209.263 |
| 35 | GAAGCGTCCAACTACGAACGA | 2528 | EASNYER | 3771 | 209.09 |
| 36 | TTCCAAACTGACACGCACCGA | 2529 | FQTDTHR | 3772 | 208.95 |
| 37 | AACAGTTCCCAATGGCCCAAC | 2530 | NSSQWPN | 3773 | 208.638 |
| 38 | GATGGTAAGACTACGTCTAAT | 2531 | DGKTTSN | 3774 | 207.638 |
| 39 | GCTGTGCATGCGACTAGTAGT | 2532 | AVHATSS | 3775 | 205.952 |
| 40 | AAAACACTCCCCGGCAGGGAA | 2533 | KTLPGRE | 3776 | 205.926 |
| 41 | ATACTGAAATCCGACGCACCA | 2534 | ILKSDAP | 3777 | 204.523 |
| 42 | AGTACGAATGAGGCTCCTAAG | 2535 | STNEAPK | 3778 | 204.522 |
| 43 | TTTGATAGTGCGAATGGTCGG | 2536 | FDSANGR | 3779 | 203.996 |
| 44 | ATGGACGCTGCGTACGGTAGT | 2537 | MDAAYGS | 3780 | 203.401 |
| 45 | AACAAAGACCACAACCACCTG | 2538 | NKDHNHL | 3781 | 202.878 |
| 46 | GGTCAGTATAGTCAGACGCTT | 2539 | GQYSQTL | 3782 | 202.553 |
| 47 | GAAGCATTCCCGCGAGCGGGC | 2540 | EAFPRAG | 3783 | 202.275 |
| 48 | GAACACACTCACTTAAACCCG | 2541 | EHTHLNP | 3784 | 201.959 |
| 49 | ATGCAACGCGAAGACGCGAAC | 2542 | MQREDAN | 3785 | 201.523 |
| 50 | CTAACCGGCTCTGACATGAAA | 2543 | LTGSDMK | 3786 | 200.376 |
| 51 | CGAGTAAACAACGACGCAATA | 2544 | RVNNDAI | 3787 | 200 |
| 52 | CGTGGTGACCAAGGCACACAC | 2545 | RGDQGTH | 3788 | 200 |
| 53 | ATTAATATTAGTAGTGATTTT | 2546 | INISSDF | 3789 | 200 |
| 54 | AATAATGATAATGGTTTTGTT | 2547 | NNDNGFV | 3790 | 200 |
| 55 | TTCATCGCTAACACTAACCCA | 2548 | FIANTNP | 3791 | 200 |
| 56 | GGACTGCACGGCACCAACGCA | 2549 | GLHGTNA | 3792 | 200 |
| 57 | AAAACCATCGACATAGCACAA | 2550 | KTIDIAQ | 3793 | 200 |
| 58 | TCGAGTGATTCTCGTATTCCG | 2551 | SSDSRIP | 3794 | 200 |
| 59 | TCTACATCTCCGGTTAACAGC | 2552 | STSPVNS | 3795 | 200 |
| 60 | GCCAGCATGCCCTCTGTAGAC | 2553 | ASMPSVD | 3796 | 200 |
| 61 | GGTCATAATATGGCACAGGCG | 2554 | GHNMAQA | 3797 | 200 |
| 62 | CACAACAAACCAAACGGAGAC | 2555 | HNKPNGD | 3798 | 197.851 |
| 63 | TACAGGATGGAAACGAACCCA | 2556 | YRMETNP | 3799 | 197.46 |
| 64 | CTTGGGAATGTGGTTCATCCG | 2557 | LGNVVHP | 3800 | 197.383 |
| 65 | GTAACGGCACACCAATTATCC | 2558 | VTAHQLS | 3801 | 196.095 |
| 66 | ACTATGGTAGAAGTACTGCCA | 2559 | TMVEVLP | 3802 | 195.586 |
| 67 | ATCAAAGGGTCTGGGTCGCAA | 2560 | IKGSGSQ | 3803 | 195.296 |
| 68 | ACTAATGGGGGGTCGCTTAAT | 2561 | TNGGSLN | 3804 | 193.959 |
| 69 | CTCGGAGGAAACAGCAGGATC | 2562 | LGGNSRI | 3805 | 193.21 |
| 70 | AGGGGTGATGCGGCGAATAAG | 2563 | RGDAANK | 3806 | 193.16 |
| 71 | GCGTTAAACGCCCAAGGGATC | 2564 | ALNAQGI | 3807 | 192.986 |
| 72 | GCTGAGCATGCGACTAGTAGT | 2565 | AEHATSS | 3808 | 192.59 |
| 73 | TACTTGACCACCGGTACTGCC | 2566 | YLTTGTA | 3809 | 191.521 |
| 74 | GCGGAGGCTCAGACGCGTGTG | 2567 | AEAQTRV | 3810 | 189.899 |
| 75 | GCTGAGCAGGGGCTGTCTTCG | 2568 | AEQGLSS | 3811 | 188.94 |
| 76 | CTGATTGTTACTCAGCATGTG | 2569 | LIVTQHV | 3812 | 188.588 |
| 77 | TCTAGTTATCAGTCTGGGCTG | 2570 | SSYQSGL | 3813 | 188.4 |
| 78 | GCTACGGTTTATAATGAGTTG | 2571 | ATVYNEL | 3814 | 188.18 |
| 79 | CATGATACGGTTGGGGAGAGG | 2572 | HDTVGER | 3815 | 187.269 |
| 80 | CGTGGGGATTTGAATGATTCT | 2573 | RGDLNDS | 3816 | 187.25 |
| 81 | CATGATATTAGTCTGGATCGT | 2574 | HDISLDR | 3817 | 186.65 |
| 82 | ACAGAACAATCTTACTCACGA | 2575 | TEQSYSR | 3818 | 186.237 |
| 83 | TGGTGAGGGGCTGAGTTTGCC | 2576 | W*GAEFA | 3819 | 186.1 |
| 84 | GCTGTGCATGCGACTAGTAGA | 2577 | AVHATSR | 3820 | 185.9 |
| 85 | ATTGAGAGTAAGACTGTGCAG | 2578 | IESKTVQ | 3821 | 185.818 |
| 86 | ACGAATGTTAGTACGCTTTTG | 2579 | TNVSTLL | 3822 | 184.365 |
| 87 | CCACCCAACGGCAGCAGTAGA | 2580 | PPNGSSR | 3823 | 183.258 |
| 88 | CCCTCTACACACGGCTACGTA | 2581 | PSTHGYV | 3824 | 183.235 |
| 89 | ACTGCGGCTAGTACTGCGAGG | 2582 | TAASTAR | 3825 | 182.452 |
| 90 | TACAACGCAGGCGGAGAACAA | 2583 | YNAGGEQ | 3826 | 182.14 |
| 91 | ACCCACAACCAACGTGAACTG | 2584 | THNQREL | 3827 | 181.989 |
| 92 | ACCTTCACGGTCGACGGTAGA | 2585 | TFTVDGR | 3828 | 181.724 |
| 93 | CACTCCAGCCCCGGGTCGTCA | 2586 | HSSPGSS | 3829 | 181.331 |
| 94 | AGTACGAGTGGTTATAATACT | 2587 | STSGYNT | 3830 | 180.372 |
| 95 | TCTGAGAAGCTGACTGATAAG | 2588 | SEKLTDK | 3831 | 180.174 |
| 96 | GGGAGGAACACAAGTAACTTG | 2589 | GRNTSNL | 3832 | 180.156 |
| 97 | ACCGGAACAGCGATCTCCCGA | 2590 | TGTAISR | 3833 | 180.148 |
| 98 | TCTATGCAGGATCCTTCTTTG | 2591 | SMQDPSL | 3834 | 179.222 |
| 99 | ACTCGGAGTGATATTGGTGTG | 2592 | TRSDIGV | 3835 | 178.75 |
| 100 | ACGCAGAATCATCAGTTGTCT | 2593 | TQNHQLS | 3836 | 178.39 |
| 101 | TTTGTTGATAATAGGCAGCCT | 2594 | FVDNRQP | 3837 | 178.388 |
| 102 | AGTTTGAATTCTTCGAGTACT | 2595 | SLNSSST | 3838 | 177.704 |
| 103 | AAGGCGGTTTCGGAGATTATT | 2596 | KAVSEII | 3839 | 177.335 |
| 104 | GGTACGAGTGATAATTATAGG | 2597 | GTSDNYR | 3840 | 176.93 |
| 105 | ATGTCTAGCCACACCGTCCAA | 2598 | MSSHTVQ | 3841 | 176.741 |
| 106 | AGTATCACCCACAGCAACACC | 2599 | SITHSNT | 3842 | 176.571 |
| 107 | GTTCAGACTAGTACTGGTGCT | 2600 | VQTSTGA | 3843 | 176.399 |
| 108 | CGTGGTGATATGACTCGTGCG | 2601 | RGDMTRA | 3844 | 176.36 |
| 109 | ATTGGTCTGCAGAATTCTACT | 2602 | IGLQNST | 3845 | 176.164 |
| 110 | AGTGCGGATCGTGATAATAAG | 2603 | SADRDNK | 3846 | 173.544 |
| 111 | TACTCTCAATCCATAAAAAAC | 2604 | YSQSIKN | 3847 | 172.725 |
| 112 | CGCTCGTTGGACAGCGGGATG | 2605 | RSLDSGM | 3848 | 172.632 |
| 113 | GCTGTGCCTCAGTCTCTGCCT | 2606 | AVPQSLP | 3849 | 172.274 |
| 114 | GCGAATGATAGTATTAAGCTG | 2607 | ANDSIKL | 3850 | 172.18 |
| 115 | AATGGTAATATTTATCCGTCT | 2608 | NGNIYPS | 3851 | 171.981 |
| 116 | GGGCAAACAAACGCAGTACAC | 2609 | GQTNAVH | 3852 | 171.5364 |
| 117 | CAAGGAGACCTACGTGGCTCG | 2610 | QGDLRGS | 3853 | 171.042 |
| 118 | GTTAAGGCGAGTGCTGGGGTT | 2611 | VKASAGV | 3854 | 170.5608 |
| 119 | ATCGCGTCAACGTGGAACATG | 2612 | IASTWNM | 3855 | 170.52 |
| 120 | AACTCGGCTGAATCCTCGAGA | 2613 | NSAESSR | 3856 | 170.31 |
| 121 | GTCTTCACGGGCCAAACTGAA | 2614 | VFTGQTE | 3857 | 170.216 |
| 122 | TTTGGTACTTCTTATACGACT | 2615 | FGTSYTT | 3858 | 169.719 |
| 123 | GCGGTTAATGAGACTAGGCTT | 2616 | AVNETRL | 3859 | 168.767 |
| 124 | GGTCGGACGGATACTCCTAAT | 2617 | GRTDTPN | 3860 | 168.735 |
| 125 | AACGACCGACCGCTTGCCAGC | 2618 | NDRPLAS | 3861 | 168.71 |
| 126 | GCTTATCAGCTGACTCCGGCT | 2619 | AYQLTPA | 3862 | 168.579 |
| 127 | ATGGGTGAGATGGGTAATATT | 2620 | MGEMGNI | 3863 | 168.24 |
| 128 | GCGGACATGCAACACACCGTA | 2621 | ADMQHTV | 3864 | 168.055 |
| 129 | GCGGTTGTTCTGAATAGTAAT | 2622 | AVVLNSN | 3865 | 168.021 |
| 130 | TTTCGTGATGGTCAGGGTATG | 2623 | FRDGQGM | 3866 | 167.193 |
| 131 | AAATCGACATCAAACATCGAA | 2624 | KSTSNIE | 3867 | 166.8294 |
| 132 | ACCCAAGCCTTCTCCCTAGGC | 2625 | TQAFSLG | 3868 | 166.751 |
| 133 | TGGTCGAGAACTGGAAACACC | 2626 | WSRTGNT | 3869 | 166.483 |
| 134 | AGCACAAACACCGAACCTAGG | 2627 | STNTEPR | 3870 | 165.304 |
| 135 | GAGAATAGTGATTTGTCTTAT | 2628 | ENSDLSY | 3871 | 165.08 |
| 136 | ATAGACGAACGTTCCTCGATA | 2629 | IDERSSI | 3872 | 165.02 |
| 137 | GATGTGCATTCGAGTATTCCT | 2630 | DVHSSIP | 3873 | 164.85 |
| 138 | ATAAGCGGTTCCACTACACAC | 2631 | ISGSTTH | 3874 | 164.788 |
| 139 | TGGCAAACCCAAGTCACTACA | 2632 | WQTQVTT | 3875 | 164.759 |
| 140 | AACATGGGTCCAATGGGCCGG | 2633 | NMGPMGR | 3876 | 164.41 |
| 141 | GTTACCCAATCGTCCACGCTA | 2634 | VTQSSTL | 3877 | 164.175 |
| 142 | ATTGATCGTAGTGCTAGTTTG | 2635 | IDRSASL | 3878 | 164.016 |
| 143 | TCTCATAGTATTACGGGTCTT | 2636 | SHSITGL | 3879 | 163.92 |
| 144 | AAAGCGGGACAACTAGTGGAA | 2637 | KAGQLVE | 3880 | 163.845 |
| 145 | AGCGGTGTATCAGAAGGAAAC | 2638 | SGVSEGN | 3881 | 163.413 |
| 146 | ACGCTTACATTATCTACCCTC | 2639 | TLTLSTL | 3882 | 163.242 |
| 147 | GCCCACAACAAACACGAAAGT | 2640 | AHNKHES | 3883 | 162.975 |
| 148 | CACAACAACAACCTGCAAAAC | 2641 | HNNNLQN | 3884 | 162.633 |
| 149 | TATAATGAGTCTTCGAATGCG | 2642 | YNESSNA | 3885 | 161.92 |
| 150 | CGTGAGCAGGCTGCGGAGAGG | 2643 | REQAAER | 3886 | 161.523 |
| 151 | ACTCAGTATGGTACTCTGCCG | 2644 | TQYGTLP | 3887 | 161.32 |
| 152 | CATCCTGGGAATAGTTCTGTG | 2645 | HPGNSSV | 3888 | 161.2 |
| 153 | AGTTCTAGGGAGGTGAGTCCG | 2646 | SSREVSP | 3889 | 161.091 |
| 154 | GCAAACTCCACAAGCCAATGG | 2647 | ANSTSQW | 3890 | 160.842 |
| 155 | CGCGACATGATCAACTCATCA | 2648 | RDMINSS | 3891 | 160.83 |
| 156 | GCATTGCCCAGCGGCGCACGA | 2649 | ALPSGAR | 3892 | 160.765 |
| 157 | CCTGGCACCAGTGGATCCCGA | 2650 | PGTSGSR | 3893 | 159.7012 |
| 158 | TGGAACGGAAACGCCACACAA | 2651 | WNGNATQ | 3894 | 158.413 |
| 159 | GGTAAAGCAACCTTAGTCCTC | 2652 | GKATLVL | 3895 | 158.386 |
| 160 | TACACCAACGGGGGCCACCTA | 2653 | YTNGGHL | 3896 | 158.346 |
| 161 | TCACAATACAACGGAACGCAA | 2654 | SQYNGTQ | 3897 | 157.872 |
| 162 | TATTCTAGTGAGAGTGCTTAT | 2655 | YSSESAY | 3898 | 157.56 |
| 163 | GTTAAGGCGGGGGTGGCTGAT | 2656 | VKAGVAD | 3899 | 157.534 |
| 164 | ACGATGGGGACGGTGCAGATT | 2657 | TMGTVQI | 3900 | 157.384 |
| 165 | GGTGTGGCTGGTGCGGTGGTG | 2658 | GVAGAVV | 3901 | 156.882 |
| 166 | TATGATAAGACTTTGAGTGTT | 2659 | YDKTLSV | 3902 | 156.791 |
| 167 | CATGGGAGTGCGTATTCGCAG | 2660 | HGSAYSQ | 3903 | 156.45 |
| 168 | ACGGCTAATATTATGAGTAAG | 2661 | TANIMSK | 3904 | 155.935 |
| 169 | TTTTCGCGGGAGACGCTGGCG | 2662 | FSRETLA | 3905 | 155.888 |
| 170 | TTGAGTGGTGCTGGTAGTCAG | 2663 | LSGAGSQ | 3906 | 155.554 |
| 171 | AGTAATGCGAATCAGATGAGT | 2664 | SNANQMS | 3907 | 155.28 |
| 172 | TCGGTCCTTTCGCCTTCGAAC | 2665 | SVLSPSN | 3908 | 154.987 |
| 173 | GATAATGTGCATGGGCAGGTG | 2666 | DNVHGQV | 3909 | 154.72 |
| 174 | GACGGACGAGAATACGCCTCG | 2667 | DGREYAS | 3910 | 154.33 |
| 175 | ATTTCGAATCAGATTAAGATG | 2668 | ISNQIKM | 3911 | 154.262 |
| 176 | GGTCGAGACAACCAACACGTA | 2669 | GRDNQHV | 3912 | 154.136 |
| 177 | CGTAATCATGAGACTGGGGCT | 2670 | RNHETGA | 3913 | 153.8093 |
| 178 | AGTGGGAGTGGTGCGAATATT | 2671 | SGSGANI | 3914 | 153.55 |
| 179 | TCTATGTCTGATGGGCTTCGG | 2672 | SMSDGLR | 3915 | 153.296 |
| 180 | AAGGAGAGTAGTGCTATGGAG | 2673 | KESSAME | 3916 | 153.04 |
| 181 | GCTAATGCTAGTACTAGTCTG | 2674 | ANASTSL | 3917 | 152.807 |
| 182 | AGTGCTTCTGGTTATTTGGTT | 2675 | SASGYLV | 3918 | 152.79 |
| 183 | GATACTACTCAGAAGCCTCAT | 2676 | DTTQKPH | 3919 | 152.687 |
| 184 | CTAATACGAGGTTCCATGGAA | 2677 | LIRGSME | 3920 | 152.55 |
| 185 | GACCGCACCTACTCAAACACA | 2678 | DRTYSNT | 3921 | 152.447 |
| 186 | GCTCTTGGGCATCAGGGGAAT | 2679 | ALGHQGN | 3922 | 152.38 |
| 187 | GCTAATCATACGTCGCAGGAG | 2680 | ANHTSQE | 3923 | 152.056 |
| 188 | GAGAGGGGTTTGAATACTAAT | 2681 | ERGLNTN | 3924 | 151.4 |
| 189 | ACTGTTGGTGGTAATCATCAT | 2682 | TVGGNHH | 3925 | 151.384 |
| 190 | CCGAGTGATAGGACTACTTAT | 2683 | PSDRTTY | 3926 | 151.365 |
| 191 | TCCAGGCAAGAAAACTTCTCC | 2684 | SRQENFS | 3927 | 151.22 |
| 192 | AATAAGACGACGATGGAGTTT | 2685 | NKTTMEF | 3928 | 151.16 |
| 193 | AAACACACAGAAAACGGGACC | 2686 | KHTENGT | 3929 | 150.985 |
| 194 | GAAACCGGAGCTATGACCTCT | 2687 | ETGAMTS | 3930 | 150.803 |
| 195 | GGTCATAGGGATTCGGGTGGT | 2688 | GHRDSGG | 3931 | 149.991 |
| 196 | AGAAACGCCGAAGGCGGATTG | 2689 | RNAEGGL | 3932 | 149.919 |
| 197 | GGGCAGCGTACGACGAATGAT | 2690 | GQRTTND | 3933 | 149.903 |
| 198 | TATAATGATGCTCTTAGGCCG | 2691 | YNDALRP | 3934 | 149.88 |
| 199 | GGGTATGCGACTACGGTTCAG | 2692 | GYATTVQ | 3935 | 149.694 |
| 200 | ATAGGGGGAGGCATAGGAAAC | 2693 | IGGGIGN | 3936 | 149.622 |
| 201 | GTGGCGGTGTCTAATACGCCT | 2694 | VAVSNTP | 3937 | 148.5637 |
| 202 | CTTGCGAATGGTATGACGGCT | 2695 | LANGMTA | 3938 | 148.449 |
| 203 | ATTTCTGGGTCGTCGTCTCTT | 2696 | ISGSSSL | 3939 | 148.328 |
| 204 | TCTAATGTTCATGTTGTTAAT | 2697 | SNVHVVN | 3940 | 148.32 |
| 205 | GTGGAGACTTCGCGTCTGTAT | 2698 | VETSRLY | 3941 | 148.302 |
| 206 | TCGAACGCAGACATCCTCGCC | 2699 | SNADILA | 3942 | 148.08 |
| 207 | AACAACGTAAACCCGTACTCG | 2700 | NNVNPYS | 3943 | 148.016 |
| 208 | ATAAGTGTAGGTGTGTCCGTA | 2701 | ISVGVSV | 3944 | 147.84 |
| 209 | TCCGCAAACAACATAGCCCCC | 2702 | SANNIAP | 3945 | 147.813 |
| 210 | GGTGTTCAGATGACTGCGGGG | 2703 | GVQMTAG | 3946 | 147.527 |
| 211 | CGTTACATCGCCAACCAAACA | 2704 | RYIANQT | 3947 | 147.305 |
| 212 | ACCACCGAAAGTCTACACCTT | 2705 | TTESLHL | 3948 | 146.899 |
| 213 | GGCTACCAAGACAAAACACGA | 2706 | GYQDKTR | 3949 | 146.705 |
| 214 | GCTTCGCGGCCTGCGGCTCAG | 2707 | ASRPAAQ | 3950 | 146.364 |
| 215 | TCTATTCAGGAGCTGTTGAGG | 2708 | SIQELLR | 3951 | 146.287 |
| 216 | ACTGTGCGTTCGCCTCAGCAG | 2709 | TVRSPQQ | 3952 | 145.74 |
| 217 | GCGGTTCTTGGTGGTAGTAAT | 2710 | AVLGGSN | 3953 | 145.633 |
| 218 | ATGAGTACGGTTCTTCGGGAG | 2711 | MSTVLRE | 3954 | 144.928 |
| 219 | ACTTATGGTATTACTCATGAT | 2712 | TYGITHD | 3955 | 144.751 |
| 220 | GATGCGAATGCGGGTACGAGG | 2713 | DANAGTR | 3956 | 144.597 |
| 221 | TTCAACGGGTACGTCATGGCA | 2714 | FNGYVMA | 3957 | 144.536 |
| 222 | ATTAATAATTTTAATACTCTG | 2715 | INNFNTL | 3958 | 144.08 |
| 223 | GTAGCCAACGAACGCCTACCG | 2716 | VANERLP | 3959 | 143.64 |
| 224 | ACTAATTCTAATCAGGGTTCG | 2717 | TNSNQGS | 3960 | 143.617 |
| 225 | GCGACGCTGAATAATAGTTAT | 2718 | ATLNNSY | 3961 | 143.512 |
| 226 | AAAAACGCTCAAATAGACCTA | 2719 | KNAQIDL | 3962 | 142.66 |
| 227 | CCTGCTACGCTACACCTGACA | 2720 | PATLHLT | 3963 | 142.552 |
| 228 | TTAGGATCGAGCACAGTATCG | 2721 | LGSSTVS | 3964 | 142.325 |
| 229 | AATTGGAATTCTGAGGGTACG | 2722 | NWNSEGT | 3965 | 142.257 |
| 230 | CCAACAAACAACTTAAGTATG | 2723 | PTNNLSM | 3966 | 141.91 |
| 231 | GCGCTTAAGCCGAATTCTACG | 2724 | ALKPNST | 3967 | 141.737 |
| 232 | ATGGTGAATTCGGAGAATACT | 2725 | MVNSENT | 3968 | 141.624 |
| 233 | AGTATGGATGCTCGGTTGACG | 2726 | SMDARLT | 3969 | 141.6 |
| 234 | AATAATGTTGTTAGGGATGAT | 2727 | NNVVRDD | 3970 | 141.597 |
| 235 | ACAAGGGACCAAAGGTCTACA | 2728 | TRDQRST | 3971 | 141.592 |
| 236 | GCTGACATCCGGAACGACAAA | 2729 | ADIRNDK | 3972 | 141.468 |
| 237 | ATGCGGGATAAGATTAATCCG | 2730 | MRDKINP | 3973 | 141.468 |
| 238 | CCGACTCCTAATGAGCATATG | 2731 | PTPNEHM | 3974 | 141.465 |
| 239 | GGATACTCACACAACTCCGAC | 2732 | GYSHNSD | 3975 | 141.448 |
| 240 | CTTCGGGATGGGATTGCTTCT | 2733 | LRDGIAS | 3976 | 141.105 |
| 241 | ATGAACCAAATGGGCGGCCTG | 2734 | MNQMGGL | 3977 | 141.089 |
| 242 | TCTTCGCCTACTAAGGGTACT | 2735 | SSPTKGT | 3978 | 140.803 |
| 243 | TATTTGGATAATCCGTTGACG | 2736 | YLDNPLT | 3979 | 140.516 |
| 244 | GTCATGCAACGATCTGCACAA | 2737 | VMQRSAQ | 3980 | 140.2 |
| 245 | TCTCTGCAACTCACAGCGGGT | 2738 | SLQLTAG | 3981 | 140.161 |
| 246 | GTGGGGTCTGGGGGTTATAAT | 2739 | VGSGGYN | 3982 | 140.139 |
| 247 | GATCGTCCGAATAATGTGTCG | 2740 | DRPNNVS | 3983 | 140.036 |
| 248 | TTGACTGAGAAGGCTTCTATT | 2741 | LTEKASI | 3984 | 139.945 |
| 249 | ACCACAAAAACGACATCTATG | 2742 | TTKTTSM | 3985 | 139.556 |
| 250 | CGTTTGGACCTGCAAGTCCAC | 2743 | RLDLQVH | 3986 | 139.528 |
| 251 | ACTCATGTGATTGGGGCTGTG | 2744 | THVIGAV | 3987 | 139.34 |
| 252 | ACCCTGACACACCTAAACCCA | 2745 | TLTHLNP | 3988 | 139.142 |
| 253 | ACCTCAATATCGTCGCAAAGC | 2746 | TSISSQS | 3989 | 138.884 |
| 254 | TACCACACCCACCAAGTCGCA | 2747 | YHTHQVA | 3990 | 138.871 |
| 255 | ATGCAAGGGCTTAACAACATG | 2748 | MQGLNNM | 3991 | 138.848 |
| 256 | GGTAGTGCGAGTAATAGTGGT | 2749 | GSASNSG | 3992 | 138.841 |
| 257 | GCGAATACTACGGGGCAGGTG | 2750 | ANTTGQV | 3993 | 138.7122 |
| 258 | AGCGTTGTCAACACCAACATC | 2751 | SVVNTNI | 3994 | 138.699 |
| 259 | TCTAATAATCTGAATCAGGAG | 2752 | SNNLNQE | 3995 | 138.543 |
| 260 | ATGAATGGGAGTGGGATGCAG | 2753 | MNGSGMQ | 3996 | 138.484 |
| 261 | ATAAGTCACGACCTTAAATAC | 2754 | ISHDLKY | 3997 | 138.458 |
| 262 | ACGGTTAATGCGGATGGGTCG | 2755 | TVNADGS | 3998 | 138.21 |
| 263 | AATCATATTAGGAATCCTATG | 2756 | NHIRNPM | 3999 | 138.143 |
| 264 | AGTACGCGGGTTACTCTGGAT | 2757 | STRVTLD | 4000 | 137.85 |
| 265 | GCTATGGGAGCACTCGTGCAC | 2758 | AMGALVH | 4001 | 137.838 |
| 266 | GCGCAAGCCATGTCAAACAGC | 2759 | AQAMSNS | 4002 | 137.76 |
| 267 | AATGCTAATGGTATGAATACT | 2760 | NANGMNT | 4003 | 137.343 |
| 268 | TTGACGCTTCCTAGTGCTAAT | 2761 | LTLPSAN | 4004 | 137.264 |
| 269 | TACCAAACGGGAGACAAAGAC | 2762 | YQTGDKD | 4005 | 137.017 |
| 270 | AGACGGGAAGAAAACGTCAAC | 2763 | RREENVN | 4006 | 136.962 |
| 271 | GGAACTACCACGGCAGTCGCG | 2764 | GTTTAVA | 4007 | 136.8811 |
| 272 | ACGGCTGGTGGGGAGCGTGCG | 2765 | TAGGERA | 4008 | 136.6 |
| 273 | GCCGGTAACGAACCTAGACCC | 2766 | AGNEPRP | 4009 | 136.593 |
| 274 | GCAAACAACACAGCCAACAGT | 2767 | ANNTANS | 4010 | 136.498 |
| 275 | CATGTGAATAGTAGGGATCTT | 2768 | HVNSRDL | 4011 | 136.187 |
| 276 | ACATACCAACTTTCCGGCAAC | 2769 | TYQLSGN | 4012 | 136.059 |
| 277 | CGGGGTGATTCGATGGCTCGG | 2770 | RGDSMAR | 4013 | 135.8517 |
| 278 | TTGAATAATTCTGCGACTGTT | 2771 | LNNSATV | 4014 | 135.76 |
| 279 | CTACACGCTAACAACGAACGG | 2772 | LHANNER | 4015 | 135.723 |
| 280 | ATGGGTTCTACGACTGGTGTG | 2773 | MGSTTGV | 4016 | 135.16 |
| 281 | GTAGTTGCAGGGCACGCAATG | 2774 | VVAGHAM | 4017 | 135.1261 |
| 282 | GGCAACGAAAAACCATCAGGG | 2775 | GNEKPSG | 4018 | 135.016 |
| 283 | CGTGGTACGGAGGGGACGCCG | 2776 | RGTEGTP | 4019 | 134.8972 |
| 284 | TGGTCCCCCGGACCCGAAGCC | 2777 | WSPGPEA | 4020 | 134.66 |
| 285 | ATTAATGTGAATCAGATGGCG | 2778 | INVNQMA | 4021 | 134.472 |
| 286 | CGGTCGGACGTTATGCAAAGT | 2779 | RSDVMQS | 4022 | 134.362 |
| 287 | AGGGACGTAAGTACAAAAGAA | 2780 | RDVSTKE | 4023 | 134.36 |
| 288 | AAAAAGTCACCCAGACTTGAA | 2781 | KKSPRLE | 4024 | 134.35 |
| 289 | ACGAGCAACACAATGTCAGAC | 2782 | TSNTMSD | 4025 | 134.345 |
| 290 | TCTAAAGGAAACGAACAAATG | 2783 | SKGNEQM | 4026 | 134.224 |
| 291 | GGTTACGCTACGACCGTGCAA | 2784 | GYATTVQ | 4027 | 134.185 |
| 292 | GGATACATGTCTAACGTCATA | 2785 | GYMSNVI | 4028 | 133.922 |
| 293 | GTGACTGTTAGTCTGGATGGG | 2786 | VTVSLDG | 4029 | 133.879 |
| 294 | ACGAATAATTTGCTGGCTCAG | 2787 | TNNLLAQ | 4030 | 133.517 |
| 295 | GCGCAGACGACGGGGTATACG | 2788 | AQTTGYT | 4031 | 133.295 |
| 296 | AGTAAGTCGACTGAGATTATG | 2789 | SKSTEIM | 4032 | 133.249 |
| 297 | TCTGCGATGCACACATTAGTC | 2790 | SAMHTLV | 4033 | 133.226 |
| 298 | GCTGGGGTGCGTGAGTCGTTT | 2791 | AGVRESF | 4034 | 133.15 |
| 299 | CAAGGCAACTCAATGGCGTCC | 2792 | QGNSMAS | 4035 | 132.82 |
| 300 | AAAAACCCGAGTGTCCAAGAA | 2793 | KNPSVQE | 4036 | 132.519 |
| 301 | CCCATAACACGGGAATCGGGA | 2794 | PITRESG | 4037 | 132.424 |
| 302 | AGCCGCTCGGCAGAAATATCG | 2795 | SRSAEIS | 4038 | 131.747 |
| 303 | AACGACATCCCCACACGAGCC | 2796 | NDIPTRA | 4039 | 131.424 |
| 304 | GCATACGGATCGTCCGGAAGA | 2797 | AYGSSGR | 4040 | 131.375 |
| 305 | CTTCATGGGAATTTTAGTCAG | 2798 | LHGNFSQ | 4041 | 131.002 |
| 306 | GCATCCAACGGGCAAGTTAAC | 2799 | ASNGQVN | 4042 | 130.736 |
| 307 | CAGAAGGGGACGGTTACTCTG | 2800 | QKGTVTL | 4043 | 130.375 |
| 308 | AACTCTAGTAACACTGGTTGG | 2801 | NSSNTGW | 4044 | 130.26 |
| 309 | ACGTATCAGCATCAGGGTCCG | 2802 | TYQHQGP | 4045 | 130.231 |
| 310 | GACGGGGTCGCACACCGCTCA | 2803 | DGVAHRS | 4046 | 130.216 |
| 311 | GACGGGCTCACGCTGGAACGC | 2804 | DGLTLER | 4047 | 130.09 |
| 312 | AGGGGTGATCTATCTACGCCT | 2805 | RGDLSTP | 4048 | 130.02 |
| 313 | ATTAATGAGATTGGTAGGATG | 2806 | INEIGRM | 4049 | 129.944 |
| 314 | CCCCAATGGGGAACTGACCCG | 2807 | PQWGTDP | 4050 | 129.94 |
| 315 | AAGCAGGTGGCGCATATTGAT | 2808 | KQVAHID | 4051 | 129.831 |
| 316 | AATACTTTGCAGAATAGTCAT | 2809 | NTLQNSH | 4052 | 129.563 |
| 317 | TGGAGCCAAGGGAACACAGCG | 2810 | WSQGNTA | 4053 | 129.438 |
| 318 | AACGAAACGCACGTACCTAAA | 2811 | NETHVPK | 4054 | 129.35 |
| 319 | GTAACGAACGAATCCCGCGCC | 2812 | VTNESRA | 4055 | 129.059 |
| 320 | CCCGAAGGCCACATGCAAGAC | 2813 | PEGHMQD | 4056 | 129 |
| 321 | TTGGATTCGACTAATTCTAGG | 2814 | LDSTNSR | 4057 | 128.63 |
| 322 | CAGTCGATTGGGCATCCGGTG | 2815 | QSIGHPV | 4058 | 128.17 |
| 323 | GTCCTGGTTAACGTACACAAC | 2816 | VLVNVHN | 4059 | 128.078 |
| 324 | GTGCATAATCCTACTACTACG | 2817 | VHNPTTT | 4060 | 127.727 |
| 325 | GGGGATAAGGCGAGTTTGGCG | 2818 | GDKASLA | 4061 | 127.698 |
| 326 | CTAAACGAATCCCGAGCGTCG | 2819 | LNESRAS | 4062 | 127.597 |
| 327 | GGTTTTCATATTAATGGTGAG | 2820 | GFHINGE | 4063 | 127.526 |
| 328 | AGTGTTAGTTCTGTGGTGTTG | 2821 | SVSSVVL | 4064 | 127.19 |
| 329 | CTTTCGACTACTTCGACGAAG | 2822 | LSTTSTK | 4065 | 127.153 |
| 330 | ACTAATACGCAGAATAATCCG | 2823 | TNTQNNP | 4066 | 127.089 |
| 331 | ACTAATCTTGCTGTTACGCTG | 2824 | TNLAVTL | 4067 | 127.0208 |
| 332 | ATGTCGGATCGTACTTCTGAT | 2825 | MSDRTSD | 4068 | 126.91 |
| 333 | TCCGCGCAATCTTTCGTAGTT | 2826 | SAQSFVV | 4069 | 126.906 |
| 334 | ATGCACACAAGTAGACCCCCA | 2827 | MHTSRPP | 4070 | 126.861 |
| 335 | ATGTCTAGCCACACAGTCCAA | 2828 | MSSHTVQ | 4071 | 126.79 |
| 336 | AGGGATACGGCTAAGGGGGTG | 2829 | RDTAKGV | 4072 | 126.773 |
| 337 | GCGTTAAAATCCGACAGCGCC | 2830 | ALKSDSA | 4073 | 126.73 |
| 338 | CAATACGACGCCAGCCGACAA | 2831 | QYDASRQ | 4074 | 126.66 |
| 339 | TTAGCCGACTCAAACAGCAAA | 2832 | LADSNSK | 4075 | 126.48 |
| 340 | TTTCAGTTGGCTAGTAATCCG | 2833 | FQLASNP | 4076 | 126.372 |
| 341 | AACTCTGTCGTAGGGAACATC | 2834 | NSVVGNI | 4077 | 126.308 |
| 342 | AGGTATGAGAGTACTAGTGCT | 2835 | RYESTSA | 4078 | 126.21 |
| 343 | GCGGATCATAATCATATTGCT | 2836 | ADHNHIA | 4079 | 126.21 |
| 344 | GTAGGCGACCAATCCCGCCCG | 2837 | VGDQSRP | 4080 | 126.106 |
| 345 | TTCAACGAAACTGCCGGGCGA | 2838 | FNETAGR | 4081 | 125.693 |
| 346 | AGCAACTCGTACTTACTCAAC | 2839 | SNSYLLN | 4082 | 125.52 |
| 347 | CGAGGCGACACAAAGAACTAC | 2840 | RGDTKNY | 4083 | 125.09 |
| 348 | ACGACTACTACTATGGCATAC | 2841 | TTTTMAY | 4084 | 125.064 |
| 349 | CGACCCCCGAACGAAAACAGA | 2842 | RPPNENR | 4085 | 124.7157 |
| 350 | TGCGCCAACATGACCAACGGC | 2843 | CANMTNG | 4086 | 124.6 |
| 351 | AATCGGTCGGATAGTTTTGCG | 2844 | NRSDSFA | 4087 | 124.567 |
| 352 | AATCTTTTGACTTCGTCGCCT | 2845 | NLLTSSP | 4088 | 124.54 |
| 353 | AACTCCAGGGAAATGGGTGTA | 2846 | NSREMGV | 4089 | 124.539 |
| 354 | ATGGGGAATCAGAGTGGTGCG | 2847 | MGNQSGA | 4090 | 124.506 |
| 355 | ATGCTCACAGAAACCAAAGCA | 2848 | MLTETKA | 4091 | 124.3 |
| 356 | CAAAACATCAAAAACATGACA | 2849 | QNIKNMT | 4092 | 124.1 |
| 357 | ATGAGTACGGTTCTTCGCGAG | 2850 | MSTVLRE | 4093 | 124.05 |
| 358 | GACCGTGCCCAAAACAACGAA | 2851 | DRAQNNE | 4094 | 123.95 |
| 359 | CATACGCAGTCGACGGGTTAT | 2852 | HTQSTGY | 4095 | 123.943 |
| 360 | ATGAGTGTGGGGAAGGTTTAT | 2853 | MSVGKVY | 4096 | 123.919 |
| 361 | GCCGGAAACTACCAATCATCA | 2854 | AGNYQSS | 4097 | 123.855 |
| 362 | AGAAACGAAAACGTAAACGCT | 2855 | RNENVNA | 4098 | 123.777 |
| 363 | GACACCCACCACACATCCAGT | 2856 | DTHHTSS | 4099 | 123.766 |
| 364 | ACTAGCTCCCCTGTTCTACAA | 2857 | TSSPVLQ | 4100 | 123.762 |
| 365 | GTGGGCCGTGACGCAGAAGCT | 2858 | VGRDAEA | 4101 | 123.74 |
| 366 | AACATGGAAAGAGGATCGCAA | 2859 | NMERGSQ | 4102 | 123.646 |
| 367 | GACAGACAAACAGGCCAAAAA | 2860 | DRQTGQK | 4103 | 123.6413 |
| 368 | GTCTTCCGGGAAGGCATCGTG | 2861 | VFREGIV | 4104 | 123.54 |
| 369 | TCCGCAAACAACATAGCCACC | 2862 | SANNIAT | 4105 | 123.32 |
| 370 | GTATCAGAAGGACAACGAATC | 2863 | VSEGQRI | 4106 | 123.005 |
| 371 | CACTACGGTAACAAAGACATA | 2864 | HYGNKDI | 4107 | 122.894 |
| 372 | GATGTTTTGCTTAAGAATTTT | 2865 | DVLLKNF | 4108 | 122.89 |
| 373 | CACACGGTTCAAATACGCGAA | 2866 | HTVQIRE | 4109 | 122.8082 |
| 374 | ACATCAGCACTAGCACACCAA | 2867 | TSALAHQ | 4110 | 122.78 |
| 375 | ATCCCAACCGGCCAAACTAGC | 2868 | IPTGQTS | 4111 | 122.752 |
| 376 | CGCAGCGACAAAGGAACGTTG | 2869 | RSDKGTL | 4112 | 122.7439 |
| 377 | AATGGTCTTACGGTTCAGCGG | 2870 | NGLTVQR | 4113 | 122.718 |
| 378 | ACGGTTGAGGGTTCTTATCCG | 2871 | TVEGSYP | 4114 | 122.67 |
| 379 | ACTAGCCACTTAGTACTTGCA | 2872 | TSHLVLA | 4115 | 122.653 |
| 380 | AATCATAGTCTGTCGGAGCAT | 2873 | NHSLSEH | 4116 | 122.5 |
| 381 | TTAACAGGCATGAACAGAGAC | 2874 | LTGMNRD | 4117 | 122.335 |
| 382 | AGTCACAACGCTGGGGTCGCC | 2875 | SHNAGVA | 4118 | 122.285 |
| 383 | GCGCACCAAACCGCCGGGCCA | 2876 | AHQTAGP | 4119 | 122.22 |
| 384 | AATTCTCATGATTTGAAGTAT | 2877 | NSHDLKY | 4120 | 121.99 |
| 385 | ACTACAATGAGTACCGGTCAA | 2878 | TTMSTGQ | 4121 | 121.98 |
| 386 | GGGTTCGGGCACGTGCCCGAA | 2879 | GFGHVPE | 4122 | 121.974 |
| 387 | ATCACCGCCGCGTCACCGCAA | 2880 | ITAASPQ | 4123 | 121.868 |
| 388 | GTTAAGGCGAGTGCTGGGGAT | 2881 | VKASAGD | 4124 | 121.75 |
| 389 | AGTATCACACACAGCAACACC | 2882 | SITHSNT | 4125 | 121.75 |
| 390 | CATAATAATAATATGCTGAAT | 2883 | HNNNMLN | 4126 | 121.659 |
| 391 | CCCAAAACTCTAACTTCGACA | 2884 | PKTLTST | 4127 | 121.479 |
| 392 | ATAACCGGCAACACCGTCGGA | 2885 | ITGNTVG | 4128 | 121.385 |
| 393 | CTCGGAAACCACTACACACCC | 2886 | LGNHYTP | 4129 | 121.38 |
| 394 | TCGTTTACTAATACGAATCCT | 2887 | SFTNTNP | 4130 | 121.294 |
| 395 | ACGTTGGATCGGAATCAGACT | 2888 | TLDRNQT | 4131 | 121.25 |
| 396 | ATCTCTACGCAAAGACCGCAC | 2889 | ISTQRPH | 4132 | 121.2071 |
| 397 | ACATTCACTACTCTGGGCAAA | 2890 | TFTTLGK | 4133 | 121.179 |
| 398 | GAGAAGCCTTCTCTTGTGATG | 2891 | EKPSLVM | 4134 | 120.927 |
| 399 | CACATCGAAACCAACACTTCG | 2892 | HIETNTS | 4135 | 120.834 |
| 400 | GGTACGAAGGATATTCTGATT | 2893 | GTKDILI | 4136 | 120.792 |
| 401 | GCGACTTTTAGTCATGCTGGT | 2894 | ATFSHAG | 4137 | 120.788 |
| 402 | GCCAACGGCATATTCCAACCG | 2895 | ANGIFQP | 4138 | 120.646 |
| 403 | CTTAATGTGAATACGCTTAAT | 2896 | LNVNTLN | 4139 | 120.55 |
| 404 | ACTTCTGCTAGTGAGAATTGG | 2897 | TSASENW | 4140 | 120.5 |
| 405 | CTTCTTCAGGGTGCGACTAAG | 2898 | LLQGATK | 4141 | 120.358 |
| 406 | GCTCTTGAGACTACTCGTGCT | 2899 | ALETTRA | 4142 | 120.26 |
| 407 | TTAACGGGACAAAACGAATTC | 2900 | LTGQNEF | 4143 | 120.24 |
| 408 | ATTTCTCATGATTTGAAGAAT | 2901 | ISHDLKN | 4144 | 120.191 |
| 409 | GCACAATACAACAACGGCGTA | 2902 | AQYNNGV | 4145 | 120.19 |
| 410 | ACGACGTCTGTGGAGAAGACT | 2903 | TTSVEKT | 4146 | 120.106 |
| 411 | GGTACGTCGGCTATTATGCCT | 2904 | GTSAIMP | 4147 | 120.093 |
| 412 | CAGCTGCAGGGGACTGAGGCG | 2905 | QLQGTEA | 4148 | 120.02 |
| 413 | GCCTTAAAATCCCAAGAACCA | 2906 | ALKSQEP | 4149 | 120.007 |
| 414 | TCTAACAGCAGTGTTGCGGTA | 2907 | SNSSVAV | 4150 | 119.89 |
| 415 | AATCATGGTCGTGCTATTGAT | 2908 | NHGRAID | 4151 | 119.776 |
| 416 | GATACGTATAATAGTAATACT | 2909 | DTYNSNT | 4152 | 119.6 |
| 417 | ACATTCCACCAAGCGGTCAAA | 2910 | TFHQAVK | 4153 | 119.54 |
| 418 | TGGCATACTGGTGTGTTTCAG | 2911 | WHTGVFQ | 4154 | 119.48 |
| 419 | AGGGGTGATCTTTCTACGCCA | 2912 | RGDLSTP | 4155 | 119.47 |
| 420 | ATGCTTAGTCAGGTTCTGACG | 2913 | MLSQVLT | 4156 | 119.414 |
| 421 | GAAAACGAAAAACGAGAAAGC | 2914 | ENEKRES | 4157 | 119.391 |
| 422 | ATTTCGAGTTATGATGGTAAT | 2915 | ISSYDGN | 4158 | 119.38 |
| 423 | ACTCGTGGCGACATGGAATTC | 2916 | TRGDMEF | 4159 | 119.36 |
| 424 | AATGTGCAGAATGTGCCTGGG | 2917 | NVQNVPG | 4160 | 119.3363 |
| 425 | TCTTTCACGAACACAAACCCA | 2918 | SFTNTNP | 4161 | 119.24 |
| 426 | TCGAACGCTGGCTACCACTCG | 2919 | SNAGYHS | 4162 | 119.169 |
| 427 | GACTACAAAAACAGCGCGCCA | 2920 | DYKNSAP | 4163 | 119.136 |
| 428 | GTCGGGAAAAACTCGTACGAA | 2921 | VGKNSYE | 4164 | 119.129 |
| 429 | GCTTACGCAGGTGTACTTGGG | 2922 | AYAGVLG | 4165 | 119.123 |
| 430 | ACGACGTCTGAGCGTGTGAAT | 2923 | TTSERVN | 4166 | 119.105 |
| 431 | GACACCGGAATCAAAAACGTT | 2924 | DTGIKNV | 4167 | 119.05 |
| 432 | TCGACCAGCTCTCTGGTTCCC | 2925 | STSSLVP | 4168 | 119.006 |
| 433 | TGGAGCGCCGGCGAACGGGTG | 2926 | WSAGERV | 4169 | 118.995 |
| 434 | AGTTCGGGGAGTTTGATTACT | 2927 | SSGSLIT | 4170 | 118.945 |
| 435 | TGGATTTCTACTGAGATGAGG | 2928 | WISTEMR | 4171 | 118.93 |
| 436 | TTTGCGGCTGGGGCGCATGGT | 2929 | FAAGAHG | 4172 | 118.92 |
| 437 | ATAGGCGACCGCGACCAACGT | 2930 | IGDRDQR | 4173 | 118.886 |
| 438 | AGTACGATTGGTAATTCTACT | 2931 | STIGNST | 4174 | 118.8619 |
| 439 | GGAAGTGGCACCGTCGGTCGA | 2932 | GSGTVGR | 4175 | 118.714 |
| 440 | CATGTTACGGCGGTGGTTGAT | 2933 | HVTAVVD | 4176 | 118.706 |
| 441 | GATAAGGCGGGGGTGGCTAAT | 2934 | DKAGVAN | 4177 | 118.67 |
| 442 | CGTCTGACTGATACTATGCAT | 2935 | RLTDTMH | 4178 | 118.589 |
| 443 | CTGAACACTCTAATCCACAAA | 2936 | LNTLIHK | 4179 | 118.565 |
| 444 | AGTTATCAGAATCCTCCGCCT | 2937 | SYQNPPP | 4180 | 118.512 |
| 445 | TTGACAGGATTAAACGCTTTC | 2938 | LTGLNAF | 4181 | 118.45 |
| 446 | AGTCCTGTGCTTTCTCCTTCG | 2939 | SPVLSPS | 4182 | 118.377 |
| 447 | GTTCAAACACACATAGGAGTC | 2940 | VQTHIGV | 4183 | 118.36 |
| 448 | CATATGTCTTCTGTTGCGACT | 2941 | HMSSVAT | 4184 | 118.34 |
| 449 | GGAAAAGCCAACGACGGTTCT | 2942 | GKANDGS | 4185 | 118.333 |
| 450 | AGTACTAACGACGAACGCAAA | 2943 | STNDERK | 4186 | 118.28 |
| 451 | CAGGGGGGGAATAGTCGGTTT | 2944 | QGGNSRF | 4187 | 118.236 |
| 452 | CCTAACAACGAAAAAAACCCG | 2945 | PNNEKNP | 4188 | 118.22 |
| 453 | GTGGCTGCGACGGGTGGTACT | 2946 | VAATGGT | 4189 | 118.173 |
| 454 | GCGATTGTGGATAGGGGGAGT | 2947 | AFVDRGS | 4190 | 118.167 |
| 455 | TCCCAACACCACACGCCACTG | 2948 | SQHHTPL | 4191 | 118.137 |
| 456 | TTACAAAGCTCGATGAACGTA | 2949 | LQSSMNV | 4192 | 118.073 |
| 457 | CGAGAAACCAACCCGTCTGAA | 2950 | RETNPSE | 4193 | 117.941 |
| 458 | GGGTTCGGGCACCTGCCCGAA | 2951 | GFGHLPE | 4194 | 117.86 |
| 459 | CGGAATGCTACTGTGACTGTT | 2952 | RNATVTV | 4195 | 117.852 |
| 460 | GTTTCAAACGCTTCGGGCTTA | 2953 | VSNASGL | 4196 | 117.707 |
| 461 | GATCGTCCGAATAATGAGTCG | 2954 | DRPNNES | 4197 | 117.7 |
| 462 | CAGGTTAGTCTGGTGAAGTTG | 2955 | QVSLVKL | 4198 | 117.643 |
| 463 | AGTAATATGCGTGAGGAGATT | 2956 | SNMREEI | 4199 | 117.629 |
| 464 | GATATTGGGCGTTCGAATAGT | 2957 | DIGRSNS | 4200 | 117.45 |
| 465 | GATCATATGAATTTGAGGTCT | 2958 | DHMNLRS | 4201 | 117.365 |
| 466 | ATTGAGCGTAGTAGTGATCGT | 2959 | IERSSDR | 4202 | 117.358 |
| 467 | TTGTCTCAGAATTTTAATCCT | 2960 | LSQNFNP | 4203 | 117.3026 |
| 468 | TATTCTATGGGTCAGCAGCCG | 2961 | YSMGQQP | 4204 | 117.283 |
| 469 | TACACACAAGGGATAATGAAC | 2962 | YTQGIMN | 4205 | 117.22 |
| 470 | ATGCTGTCTCATGGTGCGCTT | 2963 | MLSHGAL | 4206 | 117.165 |
| 471 | GCTTATAATGCTCGTCTGCCT | 2964 | AYNARLP | 4207 | 116.957 |
| 472 | AGACACTACTCCGACAACGCC | 2965 | RHYSDNA | 4208 | 116.945 |
| 473 | GCACACACAGCCATGACCTAC | 2966 | AHTAMTY | 4209 | 116.935 |
| 474 | CTAACAGGCTCTGACATGAAA | 2967 | LTGSDMK | 4210 | 116.89 |
| 475 | ACCTTACACACGAAAGACTTG | 2968 | TLHTKDL | 4211 | 116.879 |
| 476 | TCGGGTCAAAACGGTACATCA | 2969 | SGQNGTS | 4212 | 116.851 |
| 477 | CGTGGGGACGTCCACACCAAC | 2970 | RGDVHTN | 4213 | 116.829 |
| 478 | ACCGGAACGGCTACACTCCCA | 2971 | TGTATLP | 4214 | 116.72 |
| 479 | CTGGGTACGCTGCTTAGTCAG | 2972 | LGTLLSQ | 4215 | 116.72 |
| 480 | GTCCTCTCCTCCAACCTGTAC | 2973 | VLSSNLY | 4216 | 116.707 |
| 481 | AGTTTGGGGTCGGATCGTATG | 2974 | SLGSDRM | 4217 | 116.61 |
| 482 | AGGGGAGATCTTTCTACGCCT | 2975 | RGDLSTP | 4218 | 116.59 |
| 483 | AGGATGTCGGAGAGTTCTGAT | 2976 | RMSESSD | 4219 | 116.585 |
| 484 | ATGACTGAGAAGGCTTCTATT | 2977 | MTEKASI | 4220 | 116.54 |
| 485 | ACAGAACAATCTTACTAACGA | 2978 | TEQSY*R | 4221 | 116.54 |
| 486 | GTTGAATCTAAATCCGAACCA | 2979 | VESKSEP | 4222 | 116.536 |
| 487 | ATGAATCTTGTGAGGGATTCG | 2980 | MNLVRDS | 4223 | 116.526 |
| 488 | CAAAACCACTCTATAACAACA | 2981 | QNHSITT | 4224 | 116.51 |
| 489 | ACGCTGGACAACAACCACAGC | 2982 | TLDNNHS | 4225 | 116.42 |
| 490 | ACGAAGAGTTTTAATGATCTT | 2983 | TKSFNDL | 4226 | 116.38 |
| 491 | GCCACAGAACACTCAGGGCGC | 2984 | ATEHSGR | 4227 | 116.34 |
| 492 | CAAGGGACTCTCTTGTCTCCA | 2985 | QGTLLSP | 4228 | 116.293 |
| 493 | ACATTCCACCAAGGGGTCAAA | 2986 | TFHQGVK | 4229 | 116.175 |
| 494 | TGTCAGCGGGCTGATTGTGCG | 2987 | CQRADCA | 4230 | 116.17 |
| 495 | CGGTATGATGGTACTCTTAAT | 2988 | RYDGTLN | 4231 | 115.929 |
| 496 | CAAGGCGGTACAAACAACCCC | 2989 | QGGTNNP | 4232 | 115.853 |
| 497 | GGGGGTAACTACCACACCACT | 2990 | GGNYHTT | 4233 | 115.838 |
| 498 | CTGGTTGTTCAGAGTGCGCAG | 2991 | LVVQSAQ | 4234 | 115.7942 |
| 499 | TATCCTCATGAGAGTAAGAAT | 2992 | YPHESKN | 4235 | 115.731 |
| 500 | GAGATTGTTAGGCATACGCAT | 2993 | EIVRHTH | 4236 | 115.724 |
| 501 | GACCGGACAAACAACATGAGC | 2994 | DRTNNMS | 4237 | 115.705 |
| 502 | TCCGTAACCAACGGAGCGGAA | 2995 | SVTNGAE | 4238 | 115.66 |
| 503 | AGCGGACAAAAAAACTCAGAA | 2996 | SGQKNSE | 4239 | 115.653 |
| 504 | GAGCAGAAGAAGACTGATCAT | 2997 | EQKKTDH | 4240 | 115.565 |
| 505 | AATATTAATGGTGGGGGGAAT | 2998 | NINGGGN | 4241 | 115.563 |
| 506 | AAGCTGCATACTAAGGATCTT | 2999 | KLHTKDL | 4242 | 115.54 |
| 507 | AGCTTCTTGGTAGCCCACCCA | 3000 | SFLVAHP | 4243 | 115.4 |
| 508 | TACCAACAAAACATAGAAATC | 3001 | YQQNIEI | 4244 | 115.388 |
| 509 | AGGGGTGATCTTTCTACGACT | 3002 | RGDLSTT | 4245 | 115.31 |
| 510 | GCGAACCTCAACTTGACCAGT | 3003 | ANLNLTS | 4246 | 115.305 |
| 511 | ACGGTGCAGCATGCGGCGACG | 3004 | TVQHAAT | 4247 | 115.231 |
| 512 | ACCGTAAACCTCCTAGCGGCA | 3005 | TVNLLAA | 4248 | 115.223 |
| 513 | AACCAAAGAGTTGAACAAAAA | 3006 | NQRVEQK | 4249 | 115.222 |
| 514 | AATACTTATACTGCTGCGAAG | 3007 | NTYTAAK | 4250 | 115.189 |
| 515 | ATCCAAAGAGACGTGGGCCAC | 3008 | IQRDVGH | 4251 | 115.098 |
| 516 | ATCTCAGAAATGACTAGGTAC | 3009 | ISEMTRY | 4252 | 115.098 |
| 517 | ATTGCTACTAATGTGATTTAT | 3010 | IATNVIY | 4253 | 115.089 |
| 518 | AACGGCAACCACTCCATAGAC | 3011 | NGNHSID | 4254 | 115.062 |
| 519 | ACGAGTATTGGTAGTGCTAAG | 3012 | TSIGSAK | 4255 | 115.036 |
| 520 | AACGTACACTCTGTTGACAAA | 3013 | NVHSVDK | 4256 | 114.987 |
| 521 | GAACTCTCCGTTCCGAAACCA | 3014 | ELSVPKP | 4257 | 114.93 |
| 522 | TTCCTCGACAAATACAACTAC | 3015 | FLDKYNY | 4258 | 114.888 |
| 523 | TACATCCCGAACAACTCAGGA | 3016 | YIPNNSG | 4259 | 114.881 |
| 524 | GGGCTAGGACAACCCCAACTC | 3017 | GLGQPQL | 4260 | 114.817 |
| 525 | GAGGGGAGTCAGGGGAATCAT | 3018 | EGSQGNH | 4261 | 114.66 |
| 526 | AATATTTATATGGCGAGTGGT | 3019 | NIYMASG | 4262 | 114.66 |
| 527 | AATTTGCAGACTGGTGTTCAG | 3020 | NLQTGVQ | 4263 | 114.65 |
| 528 | ACCGTCGCTCCCTACAGTAGC | 3021 | TVAPYSS | 4264 | 114.65 |
| 529 | TCAAACTACTCTGACGGAATA | 3022 | SNYSDGI | 4265 | 114.649 |
| 530 | GCTACTTACGTTGTCGGAACA | 3023 | ATYVVGT | 4266 | 114.64 |
| 531 | TCAAGGGAAGCGGGTTCAACT | 3024 | SREAGST | 4267 | 114.622 |
| 532 | GCCGGAAAAACCCACGCCGAC | 3025 | AGKTHAD | 4268 | 114.6 |
| 533 | CCGCTTTCTCTTCATAATAGT | 3026 | PLSLHNS | 4269 | 114.589 |
| 534 | CTTCGAGACCTAAACGGAGGA | 3027 | LRDLNGG | 4270 | 114.553 |
| 535 | GATAGGACGTATTCGAATACG | 3028 | DRTYSNT | 4271 | 114.548 |
| 536 | TCGGTCACCAGTGGAACACAA | 3029 | SVTSGTQ | 4272 | 114.541 |
| 537 | AATATGACTTCGGCTTATCAT | 3030 | NMTSAYH | 4273 | 114.52 |
| 538 | GTTATGGGTGGTCCTGGGATT | 3031 | VMGGPGI | 4274 | 114.491 |
| 539 | GCTGGGACTCATACTGATAAG | 3032 | AGTHTDK | 4275 | 114.444 |
| 540 | GGTACTATGAATATTGGTATT | 3033 | GTMNIGI | 4276 | 114.356 |
| 541 | ACAGCCGGCGGCGAACGCGCC | 3034 | TAGGERA | 4277 | 114.34 |
| 542 | GGTATGACTTCTAATCAGGTT | 3035 | GMTSNQV | 4278 | 114.298 |
| 543 | CATTTTTCGCAGATTACTAAT | 3036 | HFSQITN | 4279 | 114.278 |
| 544 | AGCAGGATAGAAAACAACAAC | 3037 | SRIENNN | 4280 | 114.055 |
| 545 | GATACGGCGAGTTATAATAAT | 3038 | DTASYNN | 4281 | 114 |
| 546 | GTGAATCAGAGTCCTGGGGCT | 3039 | VNQSPGA | 4282 | 113.85 |
| 547 | AATAATATGGGTCATGGTCAT | 3040 | NNMGHGH | 4283 | 113.837 |
| 548 | TCGCGGCTATCACAAGACCCC | 3041 | SRLSQDP | 4284 | 113.832 |
| 549 | TCTACGTCTCAGGCTGTGCAG | 3042 | STSQAVQ | 4285 | 113.802 |
| 550 | CGATGGCAAGGACTGAGCGCG | 3043 | RWQGLSA | 4286 | 113.76 |
| 551 | GCGCATATGCATTCGGAGTTG | 3044 | AHMHSEL | 4287 | 113.74 |
| 552 | AATAATCTTACGAATTCGACG | 3045 | NNLTNST | 4288 | 113.736 |
| 553 | CAGCCTAGTGCGAGTGAGCTT | 3046 | QPSASEL | 4289 | 113.731 |
| 554 | GGGACTTCCTTGGAAAACCGA | 3047 | GTSLENR | 4290 | 113.709 |
| 555 | CTGTCTAATTCGATTACGCCT | 3048 | LSNSITP | 4291 | 113.683 |
| 556 | ACCATAGTGTCCACTTCTTAC | 3049 | TIVSTSY | 4292 | 113.628 |
| 557 | ACCCTAGGCTACCCAGACAAA | 3050 | TLGYPDK | 4293 | 113.563 |
| 558 | TCAAGACACGACGTCCGAAAC | 3051 | SRHDVRN | 4294 | 113.559 |
| 559 | AATGGTAGTGTGGCTAATCCT | 3052 | NGSVANP | 4295 | 113.48 |
| 560 | GCGATGGATGGGTATAGGGTT | 3053 | AMDGYRV | 4296 | 113.462 |
| 561 | TGGACGGGCGCACAACCTTCT | 3054 | WTGAQPS | 4297 | 113.3493 |
| 562 | AAAAACGGCGCCATAGGAACA | 3055 | KNGAIGT | 4298 | 113.335 |
| 563 | GTACTTCCAAGTCGGATCGCG | 3056 | VLPSRIA | 4299 | 113.3 |
| 564 | GATAATGTGAATTCTCAGCCT | 3057 | DNVNSQP | 4300 | 113.207 |
| 565 | GGCGTAAACGCTAGCTACAGC | 3058 | GVNASYS | 4301 | 113.174 |
| 566 | CTGTCTCACGCCATGGACCGG | 3059 | LSHAMDR | 4302 | 113.127 |
| 567 | AGGGCTCATGGGGATAATCAG | 3060 | RAHGDNQ | 4303 | 113.036 |
| 568 | TTGCAGACGCCTGGGACGACG | 3061 | LQTPGTT | 4304 | 113.01 |
| 569 | ACTCAGGTTGTTAGTATTTAT | 3062 | TQVVSIY | 4305 | 113.001 |
| 570 | CAGGTTCAGGGGACTCTGGGG | 3063 | QVQGTLG | 4306 | 112.9928 |
| 571 | GTGGGCAACCAAAACTTACCC | 3064 | VGNQNLP | 4307 | 112.889 |
| 572 | TATGTTGATTATAGTAAGTCG | 3065 | YVDYSKS | 4308 | 112.872 |
| 573 | CTGCTTAATTCTTCGGGTGTG | 3066 | LLNSSGV | 4309 | 112.857 |
| 574 | AATCAGTCGCTTACTATGGAT | 3067 | NQSLTMD | 4310 | 112.793 |
| 575 | GCTGGTAAGGATCTTAGTAAT | 3068 | AGKDLSN | 4311 | 112.792 |
| 576 | TCTTACGTTAGCGTCCCCGCC | 3069 | SYVSVPA | 4312 | 112.668 |
| 577 | AATGAGGGGCGTGTGCAGACT | 3070 | NEGRVQT | 4313 | 112.6219 |
| 578 | ACTTTGACGCAGACTGGGATG | 3071 | TLTQTGM | 4314 | 112.588 |
| 579 | GGCTTCGCATTAACTGGCACC | 3072 | GFALTGT | 4315 | 112.564 |
| 580 | CAGTCGACGCTGAATAGGCCT | 3073 | QSTLNRP | 4316 | 112.5575 |
| 581 | ACAACAACACACTCCATCTCC | 3074 | TTTHSIS | 4317 | 112.547 |
| 582 | AACACACACAGACAAGAATAC | 3075 | NTHRQEY | 4318 | 112.522 |
| 583 | TCCCAAATAGTCAACACCACA | 3076 | SQIVNTT | 4319 | 112.519 |
| 584 | CTGGTGCTTGAGATGCAGACG | 3077 | LVLEMQT | 4320 | 112.492 |
| 585 | AACGACATCTCCACCCAACGG | 3078 | NDISTQR | 4321 | 112.444 |
| 586 | TACACCGCCGACAAAAAACAA | 3079 | YTADKKQ | 4322 | 112.402 |
| 587 | TTCGGAGCAACCACCACAGCA | 3080 | FGATTTA | 4323 | 112.399 |
| 588 | GTTCAGATTTCTATGAATAAT | 3081 | VQISMNN | 4324 | 112.364 |
| 589 | ATGCATGCGCAGGAGTCTCGT | 3082 | MHAQESR | 4325 | 112.324 |
| 590 | CATGTGAATACTGCTGATCGG | 3083 | HVNTADR | 4326 | 112.313 |
| 591 | TACAGTACAGACTCCACCAAA | 3084 | YSTDSTK | 4327 | 112.271 |
| 592 | GGACACGACCGAACACCAAAC | 3085 | GHDRTPN | 4328 | 112.213 |
| 593 | ACGAGTGGTGTGCTTACGCGG | 3086 | TSGVLTR | 4329 | 112.212 |
| 594 | AATATTGCTATGTCTAAGATT | 3087 | NIAMSKI | 4330 | 112.204 |
| 595 | ATGGGGACTGAGTATCGTATG | 3088 | MGTEYRM | 4331 | 112.185 |
| 596 | CCTTATGCGAATAGGCTTGAG | 3089 | PYANRLE | 4332 | 112.174 |
| 597 | CCGCTTCAGAATAATAAGACG | 3090 | PLQNNKT | 4333 | 112.172 |
| 598 | TCCTTGACGGAAAAAGCGCCG | 3091 | SLTEKAP | 4334 | 112.15 |
| 599 | AATATGGTGTATACGAATGTG | 3092 | NMVYTNV | 4335 | 112.077 |
| 600 | ATGTTAAGTGCCACCCAAGGG | 3093 | MLSATQG | 4336 | 112.047 |
| 601 | AACATGACTCACTCAACCGTA | 3094 | NMTHSTV | 4337 | 112.0108 |
| 602 | ATTTATACGAATAGTCATGTT | 3095 | IYTNSHV | 4338 | 111.93 |
| 603 | TGGTCGCATGATCGGCCTACT | 3096 | WSHDRPT | 4339 | 111.926 |
| 604 | GAAAAAGGCACACCAAGTAGC | 3097 | EKGTPSS | 4340 | 111.922 |
| 605 | CATCATTCTACTGAGTCGTTG | 3098 | HHSTESL | 4341 | 111.911 |
| 606 | CCAAAAAGCACCCAAGTAATG | 3099 | PKSTQVM | 4342 | 111.846 |
| 607 | AGTGATAGGACTGCTCAGCAG | 3100 | SDRTAQQ | 4343 | 111.845 |
| 608 | GCTACCCTCGCACGGACCTCA | 3101 | ATLARTS | 4344 | 111.8417 |
| 609 | ATTTCTCAGGTGTCTTTTAAT | 3102 | ISQVSFN | 4345 | 111.81 |
| 610 | CATTATGGGAATAAGGATATT | 3103 | HYGNKDI | 4346 | 111.805 |
| 611 | AATGATGGGACTGATCGTAGG | 3104 | NDGTDRR | 4347 | 111.574 |
| 612 | ACCAACCACATAACCGGTCCA | 3105 | TNHITGP | 4348 | 111.551 |
| 613 | ACTAATTCTAATCAGAGTTCG | 3106 | TNSNQSS | 4349 | 111.532 |
| 614 | GTGGCGACTCATTATAATGAG | 3107 | VATHYNE | 4350 | 111.52 |
| 615 | GACCTCGGTACGGCTAGAACC | 3108 | DLGTART | 4351 | 111.516 |
| 616 | GCTCTTAGTCAGAGTGCGGGT | 3109 | ALSQSAG | 4352 | 111.4957 |
| 617 | AAAACCACCCTACACCAAGCA | 3110 | KTTLHQA | 4353 | 111.46 |
| 618 | ATGATAAACGCCATAACTCCA | 3111 | MINAITP | 4354 | 111.432 |
| 619 | GGGTCTACGCCGGGGGCGAGT | 3112 | GSTPGAS | 4355 | 111.327 |
| 620 | AATGAGAAGCCGCAGTCGACG | 3113 | NEKPQST | 4356 | 111.309 |
| 621 | TCATTGATGGGCAGTGCAGGA | 3114 | SLMGSAG | 4357 | 111.287 |
| 622 | ACCGACACGCTCAGCGAAAGA | 3115 | TDTLSER | 4358 | 111.25 |
| 623 | GCCTCGCAATCAGAAAAAAAC | 3116 | ASQSEKN | 4359 | 111.223 |
| 624 | GCTGTTAGAACACCGGCAATG | 3117 | AVRTPAM | 4360 | 111.215 |
| 625 | CCTAATGCTAGTTTTGGTCCG | 3118 | PNASFGP | 4361 | 111.172 |
| 626 | AAAGCCCACGTTGTAGAAATA | 3119 | KAHVVEI | 4362 | 111.166 |
| 627 | TATATTTCGGCGCCTCCGATG | 3120 | YISAPPM | 4363 | 111.15 |
| 628 | CCAATCCAAAACGAATCGTCC | 3121 | PIQNESS | 4364 | 111.128 |
| 629 | GGCGTAACCAACGCTTCCAAA | 3122 | GVTNASK | 4365 | 111.107 |
| 630 | GTAAACGGGGGAAAACCAGTC | 3123 | VNGGKPV | 4366 | 111.096 |
| 631 | AGTGTTCTGAGTAGTTCGACT | 3124 | SVLSSST | 4367 | 111.07 |
| 632 | TTAGCACAAGGCACGGACCGG | 3125 | LAQGTDR | 4368 | 111.032 |
| 633 | CAGTCTGTGTCGACTGGGGCG | 3126 | QSVSTGA | 4369 | 110.982 |
| 634 | TTGACGCAGGTTTATCATGAG | 3127 | LTQVYHE | 4370 | 110.91 |
| 635 | AGAGAAATGAGCAGCCTATCT | 3128 | REMSSLS | 4371 | 110.891 |
| 636 | ACGAGTACGATGACTGCGCGT | 3129 | TSTMTAR | 4372 | 110.835 |
| 637 | ACTATTCAGCAGGTTAGTAAT | 3130 | TIQQVSN | 4373 | 110.832 |
| 638 | AGGACGCAAGCAGGGGACTCA | 3131 | RTQAGDS | 4374 | 110.83 |
| 639 | AATACTTATACTGCTGGGAAG | 3132 | NTYTAGK | 4375 | 110.816 |
| 640 | AATGAGCAGAATACGCCGAGT | 3133 | NEQNTPS | 4376 | 110.79 |
| 641 | GGATTCGCCCAACAAGAAGCG | 3134 | GFAQQEA | 4377 | 110.775 |
| 642 | AGTCCGCAGCATGGTGTTATT | 3135 | SPQHGVI | 4378 | 110.7 |
| 643 | GCAGTCCACGCAACATCATCA | 3136 | AVHATSS | 4379 | 110.653 |
| 644 | GGAGACACCCGTGGTGCACAC | 3137 | GDTRGAH | 4380 | 110.63 |
| 645 | GTAAGAGAAACCACACACCTC | 3138 | VRETTHL | 4381 | 110.627 |
| 646 | CTTTCTCAACAACGCGACTAC | 3139 | LSQQRDY | 4382 | 110.6 |
| 647 | GCGACTAGGGGTGAGTCGTCT | 3140 | ATRGESS | 4383 | 110.56 |
| 648 | ACTAATGATTCTGTGGGTAGT | 3141 | TNDSVGS | 4384 | 110.545 |
| 649 | CTTACTAATAATTTTAAGGAT | 3142 | LTNNFKD | 4385 | 110.519 |
| 650 | GTGAATGGGACTCAGATTTTT | 3143 | VNGTQIF | 4386 | 110.47 |
| 651 | GGTAATACTGGGAGTCCGGGG | 3144 | GNTGSPG | 4387 | 110.431 |
| 652 | TGGACAGCTAACCAAGGCTTA | 3145 | WTANQGL | 4388 | 110.43 |
| 653 | AATACTACTCCGACGAATCAT | 3146 | NTTPTNH | 4389 | 110.42 |
| 654 | GAACGAGTCAACGGGATGGCA | 3147 | ERVNGMA | 4390 | 110.405 |
| 655 | AAAGTCACAAACAACGCATAC | 3148 | KVTNNAY | 4391 | 110.363 |
| 656 | TTATCCTCCGAATCACCCAGG | 3149 | LSSESPR | 4392 | 110.346 |
| 657 | CATACGGCGGCGGTTGCTACT | 3150 | HTAAVAT | 4393 | 110.27 |
| 658 | TACGACAGCCGACTCTACGCG | 3151 | YDSRLYA | 4394 | 110.263 |
| 659 | ATAGAACACATGCTTAGACCC | 3152 | IEHMLRP | 4395 | 110.221 |
| 660 | TACCTAGAATCCAACTACACC | 3153 | YLESNYT | 4396 | 110.18 |
| 661 | GCGTACTCATCTACCGGGCAC | 3154 | AYSSTGH | 4397 | 110.176 |
| 662 | ATCGACATATCGACGCAAAGC | 3155 | IDISTQS | 4398 | 110.14 |
| 663 | ACAACAAACTCAGGCGCGACG | 3156 | TTNSGAT | 4399 | 110.139 |
| 664 | AACGTGCTAACCACGGTTGTC | 3157 | NVLTTVV | 4400 | 110.107 |
| 665 | ACAACCGGAATCGAACGTTCC | 3158 | TTGIERS | 4401 | 110.106 |
| 666 | GCACGAGTGGACACCAACCAA | 3159 | ARVDTNQ | 4402 | 110.09 |
| 667 | CAGAGTGTGAAGGAGGCGATT | 3160 | QSVKEAI | 4403 | 110.069 |
| 668 | GCGTTGCTTAGTGTGAATGAG | 3161 | ALLSVNE | 4404 | 110.013 |
| 669 | GGGCGTGATAATCATCATGCG | 3162 | GRDNHHA | 4405 | 109.959 |
| 670 | ATTCAGTCGCAGTCGCAGTTG | 3163 | IQSQSQL | 4406 | 109.941 |
| 671 | AGTGAGGGTAGTTCGCGGTCG | 3164 | SEGSSRS | 4407 | 109.9403 |
| 672 | GACGTCCAAAACATACGCGAA | 3165 | DVQNIRE | 4408 | 109.921 |
| 673 | AAAGGCCACGCCTACGAAGCC | 3166 | KGHAYEA | 4409 | 109.897 |
| 674 | TATGTTAGGGCGCAGGATCAG | 3167 | YVRAQDQ | 4410 | 109.876 |
| 675 | GTCGACGAATACCGAAGCCGC | 3168 | VDEYRSR | 4411 | 109.853 |
| 676 | ACTCTCTCAGGCTACATGAGA | 3169 | TLSGYMR | 4412 | 109.808 |
| 677 | CCTAGTGTCCGTTTGCCCTTA | 3170 | PSVRLPL | 4413 | 109.742 |
| 678 | AACATAGCAGGCGGAGAACAA | 3171 | NIAGGEQ | 4414 | 109.702 |
| 679 | CTGCTCCAATCGACCTACTTG | 3172 | LLQSTYL | 4415 | 109.672 |
| 680 | CAGTCGGATACGACTTCGATT | 3173 | QSDTTSI | 4416 | 109.605 |
| 681 | ATTAGGTCTGGGAATGCGATG | 3174 | IRSGNAM | 4417 | 109.554 |
| 682 | ATGCTGTCTCAAGTCTTAACA | 3175 | MLSQVLT | 4418 | 109.536 |
| 683 | ACAGAACGCCAAATCGAATTA | 3176 | TERQIEL | 4419 | 109.488 |
| 684 | GGAACCCACGCCTCAGCATAC | 3177 | GTHASAY | 4420 | 109.477 |
| 685 | GTTGAGTCTTCTTATTCTCGG | 3178 | VESSYSR | 4421 | 109.457 |
| 686 | GGTGGGAATTATCATACTAAG | 3179 | GGNYHTK | 4422 | 109.445 |
| 687 | CCCACCAGTCACCAAGAACCC | 3180 | PTSHQEP | 4423 | 109.418 |
| 688 | ACCATAATCGGTGTCTTACCC | 3181 | TIIGVLP | 4424 | 109.381 |
| 689 | TCTAACAGCGGTTCTACCCTC | 3182 | SNSGSTL | 4425 | 109.379 |
| 690 | TCGATAACGACCGTAGCGAAC | 3183 | SITTVAN | 4426 | 109.347 |
| 691 | GCGTCTCCGGCGCAGACCGGC | 3184 | ASPAQTG | 4427 | 109.331 |
| 692 | TCGTTGCCGAGTCATAGTAAT | 3185 | SLPSHSN | 4428 | 109.3106 |
| 693 | CTACACAACGCCGTCGGACCC | 3186 | LHNAVGP | 4429 | 109.307 |
| 694 | CAAGCCCCGCCAACAGCACAA | 3187 | QAPPTAQ | 4430 | 109.294 |
| 695 | CCTAATACTGCTAGTAATTTT | 3188 | PNTASNF | 4431 | 109.249 |
| 696 | CCCTCCAACAGTGAAAGATTC | 3189 | PSNSERF | 4432 | 109.227 |
| 697 | GAACTCCACGCACAACAACCA | 3190 | ELHAQQP | 4433 | 109.194 |
| 698 | GGTTCTTATTCTGATGGTAGT | 3191 | GSYSDGS | 4434 | 109.162 |
| 699 | TATGGTGTGCAGGCGAATAGT | 3192 | YGVQANS | 4435 | 109.152 |
| 700 | GAAGTAGGTAAAACCACCCAC | 3193 | EVGKTTH | 4436 | 109.116 |
| 701 | ACTTCGCAGGGTAGGAGTCCT | 3194 | TSQGRSP | 4437 | 109.097 |
| 702 | GTAGAACACGTAGCCCACCAA | 3195 | VEHVAHQ | 4438 | 109.092 |
| 703 | ATCCAAAGCAGCTACAACCGC | 3196 | IQSSYNR | 4439 | 109.073 |
| 704 | ACGCTATCGGTTACCCTGGGT | 3197 | TLSVTLG | 4440 | 109.046 |
| 705 | CGGAATGAGCCGGTTAGTACT | 3198 | RNEPVST | 4441 | 108.981 |
| 706 | GTGATTGTGGGGAGTAATGAG | 3199 | VIVGSNE | 4442 | 108.955 |
| 707 | GAGCTGTCTACTCCTATGGTT | 3200 | ELSTPMV | 4443 | 108.948 |
| 708 | GCTTACAACGACCTACGATCA | 3201 | AYNDLRS | 4444 | 108.942 |
| 709 | AACGCGAACTCCGGTGAACGA | 3202 | NANSGER | 4445 | 108.906 |
| 710 | TTGTCATCACAATGGACACAA | 3203 | LSSQWTQ | 4446 | 108.9 |
| 711 | ATCAACGCCGGCAACTACCGA | 3204 | INAGNYR | 4447 | 108.883 |
| 712 | CTGAGGTCGAGTGAGGCTCCG | 3205 | LRSSEAP | 4448 | 108.866 |
| 713 | ACGTCTGATACGAATGCTAGG | 3206 | TSDTNAR | 4449 | 108.858 |
| 714 | CCGAATTCTCCGCATGGTTCT | 3207 | PNSPHGS | 4450 | 108.84 |
| 715 | ACCCAACACCTACCATCCACA | 3208 | TQHLPST | 4451 | 108.803 |
| 716 | GTGCATGGGAATGCTCCGGCT | 3209 | VHGNAPA | 4452 | 108.783 |
| 717 | TCTTCTCAGCGTGATTCTGTT | 3210 | SSQRDSV | 4453 | 108.754 |
| 718 | CCCCCCTCAGTTGACCGAAAA | 3211 | PPSVDRK | 4454 | 108.751 |
| 719 | GAGACTCTGCCGTATAAGAGT | 3212 | ETLPYKS | 4455 | 108.728 |
| 720 | CATCTTAGTCAGGCTAATCAT | 3213 | HLSQANH | 4456 | 108.727 |
| 721 | AAACCGCTAAACGGTACCAAC | 3214 | KPLNGTN | 4457 | 108.683 |
| 722 | TGGCAAACCAACGGCATGCAA | 3215 | WQTNGMQ | 4458 | 108.68 |
| 723 | ACCGTGAACGTCCACTCCGAC | 3216 | TVNVHSD | 4459 | 108.659 |
| 724 | ACCCAATACGTCGTTGCCCCT | 3217 | TQYVVAP | 4460 | 108.64 |
| 725 | AACGTCGACTCCTCTAACGTG | 3218 | NVDSSNV | 4461 | 108.62 |
| 726 | AACGGATACCAACTACAAATC | 3219 | NGYQLQI | 4462 | 108.573 |
| 727 | GAAGAAACACGGACCAGAATG | 3220 | EETRTRM | 4463 | 108.571 |
| 728 | ACCTCTCCAGCCTCTGACCGG | 3221 | TSPASDR | 4464 | 108.552 |
| 729 | CATAGTGGTGCTGGGGTTCTG | 3222 | HSGAGVL | 4465 | 108.539 |
| 730 | GCTGCTAATCCTAGTACGGAG | 3223 | AANPSTE | 4466 | 108.527 |
| 731 | ATGTTGGTACAAAACACACCC | 3224 | MLVQNTP | 4467 | 108.482 |
| 732 | GTGCAGCAGAATAATATTAAT | 3225 | VQQNNIN | 4468 | 108.473 |
| 733 | CATGATGGTTATGTTCCTAAT | 3226 | HDGYVPN | 4469 | 108.469 |
| 734 | AACTCAGGTAACAACCCCATC | 3227 | NSGNNPI | 4470 | 108.467 |
| 735 | ACGGACAACCCGTCCTACAAA | 3228 | TDNPSYK | 4471 | 108.453 |
| 736 | GGAGGCTTAAGTTTATCCTCG | 3229 | GGLSLSS | 4472 | 108.431 |
| 737 | AATAATGAGAATACGCGTAAT | 3230 | NNENTRN | 4473 | 108.418 |
| 738 | AAGAATAATAATTCTGATTCT | 3231 | KNNNSDS | 4474 | 108.367 |
| 739 | AAGGATGAGCATCTTCATTAT | 3232 | KDEHLHY | 4475 | 108.358 |
| 740 | AATTTTACTATTACGGAGGCG | 3233 | NFTITEA | 4476 | 108.32 |
| 741 | TTGAACCAAAACAGTGTCTCC | 3234 | LNQNSVS | 4477 | 108.304 |
| 742 | AATTCTCATGTTCCTAATAAT | 3235 | NSHVPNN | 4478 | 108.289 |
| 743 | AATTCTACGCATATTAATTCG | 3236 | NSTHINS | 4479 | 108.2563 |
| 744 | CATATGTCTAGTTATTCGTCG | 3237 | HMSSYSS | 4480 | 108.253 |
| 745 | AACGTACCCAACGGACAAGGA | 3238 | NVPNGQG | 4481 | 108.25 |
| 746 | AACGGTCCGACCGGATCCGCC | 3239 | NGPTGSA | 4482 | 108.245 |
| 747 | AAAAGCAACGCGGGATTCGGT | 3240 | KSNAGFG | 4483 | 108.23 |
| 748 | GCGGCCGCACTAGAAACAATA | 3241 | AAALETI | 4484 | 108.223 |
| 749 | AACCGTCAAAGGGACTTCGAA | 3242 | NRQRDFE | 4485 | 108.196 |
| 750 | GGGTCAGGGAACGAACCCGGG | 3243 | GSGNEPG | 4486 | 108.192 |
| 751 | GTTAGTGTGGCTGTGCCTGCG | 3244 | VSVAVPA | 4487 | 108.11 |
| 752 | CACTCTAACACACACTACGAA | 3245 | HSNTHYE | 4488 | 108.11 |
| 753 | CCTGACAGAGCGAACGACAAA | 3246 | PDRANDK | 4489 | 108.058 |
| 754 | CAAGTTGGGGCTCTAATGGTT | 3247 | QVGALMV | 4490 | 108.037 |
| 755 | TTAACACCCCAAGGGACTAGT | 3248 | LTPQGTS | 4491 | 108.028 |
| 756 | CTATACGACGGAAAACACGTC | 3249 | LYDGKHV | 4492 | 107.972 |
| 757 | CTAACCGAATCTGTGAGAAAC | 3250 | LTESVRN | 4493 | 107.93 |
| 758 | AGTACTTATGGGAATACTTAT | 3251 | STYGNTY | 4494 | 107.929 |
| 759 | AATGCTATTTCTACTAATAAT | 3252 | NAISTNN | 4495 | 107.907 |
| 760 | ATTGCTCATGTGTCTACTAAT | 3253 | IAHVSTN | 4496 | 107.849 |
| 761 | AGTGAGGAGAGGACGCGTGCG | 3254 | SEERTRA | 4497 | 107.833 |
| 762 | CGTTGGTCTGAAAACAACTCC | 3255 | RWSENNS | 4498 | 107.83 |
| 763 | GATGGTAATAATACGACTTAT | 3256 | DGNNTTY | 4499 | 107.748 |
| 764 | GTGACGACTGTTGATAGTGCT | 3257 | VTTVDSA | 4500 | 107.738 |
| 765 | ACCGTAAAACAAACAAGTCCG | 3258 | TVKQTSP | 4501 | 107.7213 |
| 766 | TCTATCTACCTCGCGTCCACT | 3259 | SIYLAST | 4502 | 107.712 |
| 767 | ACGACCCGAAACGAACACTCG | 3260 | TTRNEHS | 4503 | 107.707 |
| 768 | TCGTATGATATGCATACGAAT | 3261 | SYDMHTN | 4504 | 107.705 |
| 769 | GTCTCTACATACCTCCTGGCA | 3262 | VSTYLLA | 4505 | 107.687 |
| 770 | GGAGAACAAAGCCACAACCAA | 3263 | GEQSHNQ | 4506 | 107.684 |
| 771 | ACTGCCAACAACCACTCTCCG | 3264 | TANNHSP | 4507 | 107.671 |
| 772 | CAATTCCACGGGACATCTGAA | 3265 | QFHGTSE | 4508 | 107.652 |
| 773 | AACGTTCTGGGAGCGTCTAGC | 3266 | NVLGASS | 4509 | 107.64 |
| 774 | AGGGATAGTACTATTAGTCGG | 3267 | RDSTISR | 4510 | 107.635 |
| 775 | GTTATTGGGACTTCTAGGGAT | 3268 | VIGTSRD | 4511 | 107.5934 |
| 776 | AATTATGAGAAGGAGTTTGTT | 3269 | NYEKEFV | 4512 | 107.592 |
| 777 | ATGGACCAAAGCCACTCCCGA | 3270 | MDQSHSR | 4513 | 107.563 |
| 778 | AATTCTCAGAATCCTCAGGGT | 3271 | NSQNPQG | 4514 | 107.562 |
| 779 | CACACGGGCACGGACAACCGA | 3272 | HTGTDNR | 4515 | 107.5323 |
| 780 | TATAATACTGTTGATCAGCGG | 3273 | YNTVDQR | 4516 | 107.523 |
| 781 | AAAGAAAGCCTCGAAGACGTC | 3274 | KESLEDV | 4517 | 107.49 |
| 782 | ACTGCGAATAGTACGTATGTG | 3275 | TANSTYV | 4518 | 107.479 |
| 783 | TATCTGAATAGTACGCAGATT | 3276 | YLNSTQI | 4519 | 107.436 |
| 784 | CGTGTTGAAGACACCAACTCC | 3277 | RVEDTNS | 4520 | 107.416 |
| 785 | AACGACGCACGCAACCGTGCA | 3278 | NDARNRA | 4521 | 107.37 |
| 786 | AATACTAATAATCAGGAGCAG | 3279 | NTNNQEQ | 4522 | 107.332 |
| 787 | ACCGTCGGATCGAACAGTATA | 3280 | TVGSNSI | 4523 | 107.3 |
| 788 | TATGGGGAGCGTGCTAGGACG | 3281 | YGERART | 4524 | 107.297 |
| 789 | CCGACCGGAGGCTCACCACCA | 3282 | PTGGSPP | 4525 | 107.265 |
| 790 | CTTGGGCAGGTTAATTCTACG | 3283 | LGQVNST | 4526 | 107.229 |
| 791 | GTCTCGGGTCCGGTATCGGTC | 3284 | VSGPVSV | 4527 | 107.222 |
| 792 | GGTACTAATCATGATTTTTCG | 3285 | GTNHDFS | 4528 | 107.169 |
| 793 | AAGACGCTTGATAATAATGCT | 3286 | KTLDNNA | 4529 | 107.165 |
| 794 | CACAGTGAACTACGTCAAAAC | 3287 | HSELRQN | 4530 | 107.157 |
| 795 | GAGAAGAATCTGACTAATGCT | 3288 | EKNLTNA | 4531 | 107.131 |
| 796 | ACCGGACTCGGAGGCAACAGT | 3289 | TGLGGNS | 4532 | 107.113 |
| 797 | AAAGACCACATCCTCAGCCTC | 3290 | KDHILSL | 4533 | 107.108 |
| 798 | ATAACTACTGGCGGAGTGCTA | 3291 | ITTGGVL | 4534 | 107.108 |
| 799 | CTGGCTGATTCGAATTCTAAG | 3292 | LADSNSK | 4535 | 107.1 |
| 800 | AGTATTTCTGATAAGAATCAG | 3293 | SISDKNQ | 4536 | 107.08 |
| 801 | TATATTGCTGGGGGGGAGCAG | 3294 | YIAGGEQ | 4537 | 107.069 |
| 802 | TTGCCGGATAAGGGGCGGATT | 3295 | LPDKGRI | 4538 | 107.06 |
| 803 | TTGATCCAAACGCAAGGCACG | 3296 | LIQTQGT | 4539 | 107.042 |
| 804 | TACTCCGGAGAACTAAACAAA | 3297 | YSGELNK | 4540 | 107.037 |
| 805 | TGCGCATCAGAAGTTTGCCAA | 3298 | CASEVCQ | 4541 | 107.035 |
| 806 | CTTATGGCTGCTAATACTGCG | 3299 | LMAANTA | 4542 | 107.032 |
| 807 | CATCAGTCTTTTGATGCTGGT | 3300 | HQSFDAG | 4543 | 107.001 |
| 808 | GGGGAGACGCTGAGGTCTCAG | 3301 | GETLRSQ | 4544 | 106.999 |
| 809 | CAGACTGATGGTCCTAATTTT | 3302 | QTDGPNF | 4545 | 106.978 |
| 810 | ACGACGACTAATGTGAATTTT | 3303 | TTTNVNF | 4546 | 106.969 |
| 811 | AACATGACCAACGAAAACGGA | 3304 | NMTNENG | 4547 | 106.938 |
| 812 | GGGTATAGTCCTTCGACGCCG | 3305 | GYSPSTP | 4548 | 106.892 |
| 813 | TTGCAGGTTACGGTTCATAAT | 3306 | LQVTVHN | 4549 | 106.879 |
| 814 | GATCTGACGCATGTTCATCGT | 3307 | DLTHVHR | 4550 | 106.874 |
| 815 | ACGGAGCTTAGTGAGTATACT | 3308 | TELSEYT | 4551 | 106.852 |
| 816 | ATGACAGTCGCCAGTACTAGC | 3309 | MTVASTS | 4552 | 106.843 |
| 817 | AGCAGTCAAGCCCACGGCCCA | 3310 | SSQAHGP | 4553 | 106.822 |
| 818 | ACCAGAAGCCCGAACGAAGAC | 3311 | TRSPNED | 4554 | 106.81 |
| 819 | GATAATAATAAGCATGGTACT | 3312 | DNNKHGT | 4555 | 106.806 |
| 820 | AGGGAGATTGTTCATAGTAAT | 3313 | REFVHSN | 4556 | 106.802 |
| 821 | CGGAAACTTGAACTCGACCTA | 3314 | RKLELDL | 4557 | 106.801 |
| 822 | ATCTACGAAACCGTAACCTTG | 3315 | IYETVTL | 4558 | 106.801 |
| 823 | AATAGTGGTAGTACGAGTTTT | 3316 | NSGSTSF | 4559 | 106.783 |
| 824 | CCAAGTACGAACGAAAGCCGC | 3317 | PSTNESR | 4560 | 106.782 |
| 825 | CAAGCCGACCTCAGGTACAAA | 3318 | QADLRYK | 4561 | 106.773 |
| 826 | GATCAGCCGGGGTATGTGCGT | 3319 | DQPGYVR | 4562 | 106.7387 |
| 827 | GATGCTATGCTTGCTCATCCG | 3320 | DAMLAHP | 4563 | 106.735 |
| 828 | ACACGTCACGACGGCAGTACG | 3321 | TRHDGST | 4564 | 106.675 |
| 829 | CTGGCGAATATGAGTGCGCCG | 3322 | LANMSAP | 4565 | 106.664 |
| 830 | ACTGGTCATCCGCCGGCGGCG | 3323 | TGHPPAA | 4566 | 106.654 |
| 831 | TCGAGTATTAGTCTGCGGTAT | 3324 | SSISLRY | 4567 | 106.645 |
| 832 | ATGCACGTCGACAAAACGAGT | 3325 | MHVDKTS | 4568 | 106.639 |
| 833 | GGGAGTGATTCTAAGCATCCT | 3326 | GSDSKHP | 4569 | 106.5782 |
| 834 | GGAGAAAGCTCCTCAATAAGC | 3327 | GESSSIS | 4570 | 106.551 |
| 835 | GTCGTCCACTCACACAGTGAA | 3328 | VVHSHSE | 4571 | 106.496 |
| 836 | AGTGTGCGGGCGCATGTTTTG | 3329 | SVRAHVL | 4572 | 106.487 |
| 837 | GCGGATGGGGCTAAGTCTGCT | 3330 | ADGAKSA | 4573 | 106.485 |
| 838 | GGGGAAGCACGCCGAGAAGCC | 3331 | GEARREA | 4574 | 106.442 |
| 839 | TTTAATGCTACGGTGGTGCAT | 3332 | FNATVVH | 4575 | 106.437 |
| 840 | TGGACGGAAGGGGGCTCAGGA | 3333 | WTEGGSG | 4576 | 106.423 |
| 841 | GATTCTTCTTATACGCATCCG | 3334 | DSSYTHP | 4577 | 106.422 |
| 842 | TTCCCAAGTAGGGACAACGTA | 3335 | FPSRDNV | 4578 | 106.39 |
| 843 | GCCATCACGCACATCGGTACA | 3336 | AITHIGT | 4579 | 106.365 |
| 844 | GCTTTTAAGTCGGGTAGTATT | 3337 | AFKSGSI | 4580 | 106.334 |
| 845 | ATGTCAAACGCCTCCTACATA | 3338 | MSNASYI | 4581 | 106.319 |
| 846 | GCGGAGAGGAATGATAGGACG | 3339 | AERNDRT | 4582 | 106.305 |
| 847 | ACATTAGAAACAACCCGCAGC | 3340 | TLETTRS | 4583 | 106.244 |
| 848 | CGCTTACACGGCTCAGACTCG | 3341 | RLHGSDS | 4584 | 106.237 |
| 849 | TATGAGGGGCATATGAATACT | 3342 | YEGHMNT | 4585 | 106.2354 |
| 850 | TCTGTGACGACTAATCTGATG | 3343 | SVTTNLM | 4586 | 106.217 |
| 851 | TTGCGTGATCAGACTAGTATG | 3344 | LRDQTSM | 4587 | 106.167 |
| 852 | CCCGCCAGTCACAGCGCGGGA | 3345 | PASHSAG | 4588 | 106.151 |
| 853 | GTGGTTGAGAATTTGAGGCAG | 3346 | VVENLRQ | 4589 | 106.147 |
| 854 | CAACAATCACAAAACTCTATA | 3347 | QQSQNSI | 4590 | 106.115 |
| 855 | CTTGTTGATACGGATAGGAAT | 3348 | LVDTDRN | 4591 | 106.108 |
| 856 | AACGAAATGGGAAACTACGTC | 3349 | NEMGNYV | 4592 | 106.104 |
| 857 | TCCACCGACCCCCGATACTCA | 3350 | STDPRYS | 4593 | 106.097 |
| 858 | ACTAATGGTATTTATCAGCCT | 3351 | TNGIYQP | 4594 | 106.095 |
| 859 | TGGGTAAACAGTGTGGGCAAC | 3352 | WVNSVGN | 4595 | 106.084 |
| 860 | GGGGTATCTAACAACTCTAGC | 3353 | GVSNNSS | 4596 | 106.079 |
| 861 | AATGTTAATGCGCAGAGTAGG | 3354 | NVNAQSR | 4597 | 106.064 |
| 862 | ACGACGCCGCCTTTTTCTAAT | 3355 | TTPPFSN | 4598 | 106.044 |
| 863 | ACAGGCAGCTCCCACACCAAC | 3356 | TGSSHTN | 4599 | 106.0345 |
| 864 | TACGTCGACAAATCAATGACA | 3357 | YVDKSMT | 4600 | 106.009 |
| 865 | CTAATCAAAAACAACATGCTC | 3358 | LIKNNML | 4601 | 105.9827 |
| 866 | GGGGGTACGGGGTTGTCGAAG | 3359 | GGTGLSK | 4602 | 105.98 |
| 867 | GCTCTTCATAATCTGATGAAT | 3360 | ALHNLMN | 4603 | 105.977 |
| 868 | GTGCATGTGACTAATGTGTTG | 3361 | VHVTNVL | 4604 | 105.924 |
| 869 | TCGACGACGCACCCTTCCGAA | 3362 | STTHPSE | 4605 | 105.898 |
| 870 | AGCGTAGGTAGTCCAACACAC | 3363 | SVGSPTH | 4606 | 105.8936 |
| 871 | ATGAGTAATGATTTGCCTGGG | 3364 | MSNDLPG | 4607 | 105.877 |
| 872 | TTCTCGTCAACCGAAGCCAGA | 3365 | FSSTEAR | 4608 | 105.858 |
| 873 | GCCGGTCACCAACAACTGGCC | 3366 | AGHQQLA | 4609 | 105.846 |
| 874 | GGTACCATATTACCAAACCAA | 3367 | GTILPNQ | 4610 | 105.829 |
| 875 | AGCGCGGTTTCTGGTAGCAGC | 3368 | SAVSGSS | 4611 | 105.825 |
| 876 | GAGGTGTCTAGGGATGGTCTG | 3369 | EVSRDGL | 4612 | 105.814 |
| 877 | CAATCACTCAAAGACGGCACT | 3370 | QSLKDGT | 4613 | 105.804 |
| 878 | ACGCGTGAGGGTAATCATGCT | 3371 | TREGNHA | 4614 | 105.8 |
| 879 | GTGGCGACCCAAAACCTTCTT | 3372 | VATQNLL | 4615 | 105.795 |
| 880 | GCCGAAATGACGCACCGCCTC | 3373 | AEMTHRL | 4616 | 105.771 |
| 881 | CAACGGCCAGACCCGCTTAAA | 3374 | QRPDPLK | 4617 | 105.764 |
| 882 | GAACACATCTCTAGCTACGGA | 3375 | EHISSYG | 4618 | 105.752 |
| 883 | CAAAAAAGCAACGACCAAAAC | 3376 | QKSNDQN | 4619 | 105.744 |
| 884 | AATCTTGTGATGAGTGGGACG | 3377 | NLVMSGT | 4620 | 105.742 |
| 885 | GGAGCGGGACAATCTCACGTG | 3378 | GAGQSHV | 4621 | 105.721 |
| 886 | CTCAACCACACAATGCCCCTC | 3379 | LNHTMPL | 4622 | 105.713 |
| 887 | GTATCACAATCACACGACGTG | 3380 | VSQSHDV | 4623 | 105.687 |
| 888 | GCTAATTCTGCTACTAATCAG | 3381 | ANSATNQ | 4624 | 105.679 |
| 889 | GGCACAGGAGGTAACCGAGAA | 3382 | GTGGNRE | 4625 | 105.671 |
| 890 | GCGAAGTCGTCGATTATTTTG | 3383 | AKSSUL | 4626 | 105.661 |
| 891 | GGAGGAACAGCCCTTGGGAGC | 3384 | GGTALGS | 4627 | 105.613 |
| 892 | AACAAAGTAGAATCTGACCCA | 3385 | NKVESDP | 4628 | 105.59 |
| 893 | AACTCGAAACAACCCGACGTC | 3386 | NSKQPDV | 4629 | 105.572 |
| 894 | AGTTATGCTGATCGTCGGCTG | 3387 | SYADRRL | 4630 | 105.567 |
| 895 | AATGTGAATCCGAATGGGCCG | 3388 | NVNPNGP | 4631 | 105.53 |
| 896 | GAACACAACTCAAAAACTTAC | 3389 | EHNSKTY | 4632 | 105.496 |
| 897 | ACCCAAGGATCTAACACCACA | 3390 | TQGSNTT | 4633 | 105.489 |
| 898 | AGCAACGTATCAGCTTACGCA | 3391 | SNVSAYA | 4634 | 105.48 |
| 899 | GCGTACAGTGACAGCGCCCGC | 3392 | AYSDSAR | 4635 | 105.457 |
| 900 | GGGTCGCAATACGCGAACCGC | 3393 | GSQYANR | 4636 | 105.402 |
| 901 | ACAATGAGCGTAACTCTGGAA | 3394 | TMSVTLE | 4637 | 105.393 |
| 902 | CAGACGACTATTCTGGCTGCT | 3395 | QTTILAA | 4638 | 105.386 |
| 903 | TTGCTCCAATCCATAGTGGTA | 3396 | LLQSIW | 4639 | 105.381 |
| 904 | GTTCACGCTAACGCTACATTA | 3397 | VHANATL | 4640 | 105.38 |
| 905 | AACAAAACAAACGCCGACTAC | 3398 | NKTNADY | 4641 | 105.38 |
| 906 | AACTACGACACCGGCGCCAAA | 3399 | NYDTGAK | 4642 | 105.378 |
| 907 | GTCTACCACAACCGCGACGTT | 3400 | VYHNRDV | 4643 | 105.358 |
| 908 | GATTCTGCTCCGAGGTCTATT | 3401 | DSAPRSI | 4644 | 105.351 |
| 909 | TTGATTGCGAATCTGAGTAAT | 3402 | LIANLSN | 4645 | 105.341 |
| 910 | CCGCAAGACGTCCGCCAAACA | 3403 | PQDVRQT | 4646 | 105.331 |
| 911 | ACAATGACAGCAATAGCAATG | 3404 | TMTAIAM | 4647 | 105.327 |
| 912 | ACATACGCCTCTACTGAAGCG | 3405 | TYASTEA | 4648 | 105.324 |
| 913 | CCTCACGCCAACGGAGTGACA | 3406 | PHANGVT | 4649 | 105.298 |
| 914 | CGGGCTGATGTTTCTTGGTCT | 3407 | RADVSWS | 4650 | 105.286 |
| 915 | CTGACGCACATGACCGGAACC | 3408 | LTHMTGT | 4651 | 105.272 |
| 916 | GCAAACGACTCTGCCAAAACA | 3409 | ANDSAKT | 4652 | 105.269 |
| 917 | GCTAATTCTGGGTTGCATAAT | 3410 | ANSGLHN | 4653 | 105.246 |
| 918 | AACGTGGGCACCGACAGAGAC | 3411 | NVGTDRD | 4654 | 105.231 |
| 919 | GTCGGAACAACCTCGAACGGC | 3412 | VGTTSNG | 4655 | 105.226 |
| 920 | GGAGTTCTTGGGATACTGGTC | 3413 | GVLGILV | 4656 | 105.184 |
| 921 | CGAATCAACGCAGCAATCGAC | 3414 | RINAAID | 4657 | 105.1475 |
| 922 | CCCGACACTCGCCCATCCATA | 3415 | PDTRPSI | 4658 | 105.135 |
| 923 | GGTGAATCACGTACAAACATG | 3416 | GESRTNM | 4659 | 105.119 |
| 924 | ATTTTGCTTGCTCAGTCTGCT | 3417 | ILLAQSA | 4660 | 105.117 |
| 925 | TATAATAGGGATAATGGTTCT | 3418 | YNRDNGS | 4661 | 105.083 |
| 926 | TGGAATAGTCCGGGTGAGGCG | 3419 | WNSPGEA | 4662 | 105.053 |
| 927 | CTGTTGGGGGCTCATCAGCCG | 3420 | LLGAHQP | 4663 | 105.052 |
| 928 | ATTGGTAAGGATAGTGTTCCG | 3421 | IGKDSVP | 4664 | 105.044 |
| 929 | ACGCGGGAGAGTCTGGTGGAT | 3422 | TRESLVD | 4665 | 105.022 |
| 930 | GCCTCTAACCACCTACAAGCC | 3423 | ASNHLQA | 4666 | 105.013 |
| 931 | AATCTTCAGACGGGTAAGGCT | 3424 | NLQTGKA | 4667 | 104.976 |
| 932 | ACTGTAGGATCCTCATACGCT | 3425 | TVGSSYA | 4668 | 104.9737 |
| 933 | GACACTAACGGAATAAAATCA | 3426 | DTNGIKS | 4669 | 104.968 |
| 934 | AGTCTGCGGATGGAGAATAGT | 3427 | SLRMENS | 4670 | 104.957 |
| 935 | ACTAAGGGTAATAATCTGGTT | 3428 | TKGNNLV | 4671 | 104.92 |
| 936 | CATACGAATCAGATGCAGCCT | 3429 | HTNQMQP | 4672 | 104.919 |
| 937 | AACGGCAACTACGACGGCGCG | 3430 | NGNYDGA | 4673 | 104.912 |
| 938 | GAGGCGCATAATCGTGGTAAT | 3431 | EAHNRGN | 4674 | 104.898 |
| 939 | GGGACGGTTAACTCAAGTGCA | 3432 | GTVNSSA | 4675 | 104.861 |
| 940 | GGGCCGACGATGAATCATAAT | 3433 | GPTMNHN | 4676 | 104.854 |
| 941 | GTACCCAACAACAACACTTCG | 3434 | VPNNNTS | 4677 | 104.834 |
| 942 | GTTTCTAACAAATCTGGAAGT | 3435 | VSNKSGS | 4678 | 104.818 |
| 943 | TGGGGAGTCAGTAACTCAGCA | 3436 | WGVSNSA | 4679 | 104.795 |
| 944 | GTCTCTAACGTCCTCTACAGC | 3437 | VSNVLYS | 4680 | 104.772 |
| 945 | GCCGGCCAAAACAGTGTGGGC | 3438 | AGQNSVG | 4681 | 104.77 |
| 946 | GGTACGAGTCTGGAGAATAGG | 3439 | GTSLENR | 4682 | 104.754 |
| 947 | CAGATGAATATTCATGATAAG | 3440 | QMNIHDK | 4683 | 104.736 |
| 948 | CCTCAACTAAGCGGCACAGCG | 3441 | PQLSGTA | 4684 | 104.733 |
| 949 | AGTTCGACTCCGCAGGATACT | 3442 | SSTPQDT | 4685 | 104.713 |
| 950 | GTGCAGGGGCAGACCGGCTGG | 3443 | VQGQTGW | 4686 | 104.688 |
| 951 | GGTCTGACGGGTGATTTGGTT | 3444 | GLTGDLV | 4687 | 104.682 |
| 952 | AACCACCCCGCACCAAGCTCA | 3445 | NHPAPSS | 4688 | 104.679 |
| 953 | AAAGAAAAAACCACCCGCGAA | 3446 | KEKTTRE | 4689 | 104.665 |
| 954 | ACTACTAATCCGCAGACGCAG | 3447 | TTNPQTQ | 4690 | 104.663 |
| 955 | GGAGGTGAACACGCAAGAAAC | 3448 | GGEHARN | 4691 | 104.66 |
| 956 | ACGACCGAAGCTGTTGTAGCA | 3449 | TTEAVVA | 4692 | 104.656 |
| 957 | CAAAACAGTGACCTCGCCAGC | 3450 | QNSDLAS | 4693 | 104.638 |
| 958 | TACTCTACAGAAGCACGAGTC | 3451 | YSTEARV | 4694 | 104.609 |
| 959 | ACCGGACAAGCGGGCGGATCG | 3452 | TGQAGGS | 4695 | 104.571 |
| 960 | ACTTCGTCTAATCTTTATGTG | 3453 | TSSNLYV | 4696 | 104.559 |
| 961 | ACGGCTCGTGCGATTGATATG | 3454 | TARAIDM | 4697 | 104.551 |
| 962 | CAGGAGTCTAATAGGGGGGTG | 3455 | QESNRGV | 4698 | 104.547 |
| 963 | AGTATCGGATTCTCAGTAGGC | 3456 | SIGFSVG | 4699 | 104.529 |
| 964 | GAGCGGAGTACGCATAATGTT | 3457 | ERSTHNV | 4700 | 104.513 |
| 965 | GCAAACCACGACAACATCGTG | 3458 | ANHDNIV | 4701 | 104.501 |
| 966 | TGGGCTATGAATAATGTGCCG | 3459 | WAMNNVP | 4702 | 104.498 |
| 967 | TATATTGCTGCGGGTGAGCAG | 3460 | YIAAGEQ | 4703 | 104.498 |
| 968 | AGTTCGAATACTTCTGGTAGT | 3461 | SSNTSGS | 4704 | 104.4928 |
| 969 | ATGGGGAAGCATGAGGGTCTT | 3462 | MGKHEGL | 4705 | 104.481 |
| 970 | GTGCTTACTCATCTGCCGACG | 3463 | VLTHLPT | 4706 | 104.4786 |
| 971 | GAAATGGGTAACCAATACCCA | 3464 | EMGNQYP | 4707 | 104.453 |
| 972 | AGTCTGCGTCCAACCCTACCT | 3465 | SLRPTLP | 4708 | 104.448 |
| 973 | TCGGCTAACTTATACAAACAA | 3466 | SANLYKQ | 4709 | 104.394 |
| 974 | CAAAACGACAGAAAACCGGAC | 3467 | QNDRKPD | 4710 | 104.391 |
| 975 | ATTATTTCGGGTATTACGGTG | 3468 | IISGITV | 4711 | 104.365 |
| 976 | CCATCCGAAATGAGGGCCGTA | 3469 | PSEMRAV | 4712 | 104.361 |
| 977 | TTGGTTACGCAGACGCCGAAT | 3470 | LVTQTPN | 4713 | 104.337 |
| 978 | ATTGCGCAGAATGAGACGTAT | 3471 | IAQNETY | 4714 | 104.336 |
| 979 | CCATACTTAAGAAACATGGCG | 3472 | PYLRNMA | 4715 | 104.321 |
| 980 | GGCGTGAACACAAAAATCGAA | 3473 | GVNTKIE | 4716 | 104.311 |
| 981 | TACTCTTCTGAAATGAGCGAA | 3474 | YSSEMSE | 4717 | 104.31 |
| 982 | TTAGAAAACCCAACACCAGCA | 3475 | LENPTPA | 4718 | 104.305 |
| 983 | GGTGTTATGTCTAATGCTACT | 3476 | GVMSNAT | 4719 | 104.289 |
| 984 | GCCCACACTGCATTAGCGGGG | 3477 | AHTALAG | 4720 | 104.27 |
| 985 | CCTGTTGTGAGGGATCGTTCT | 3478 | PVVRDRS | 4721 | 104.2336 |
| 986 | TCTGCGGGTATGGTGAGTCTG | 3479 | SAGMVSL | 4722 | 104.229 |
| 987 | TCGGGTGTTAATAGTGAGCGT | 3480 | SGVNSER | 4723 | 104.2093 |
| 988 | AATGGGGATGTTACTAATATG | 3481 | NGDVTNM | 4724 | 104.179 |
| 989 | TCTGTTGTGCCTACGGATAAG | 3482 | SVVPTDK | 4725 | 104.174 |
| 990 | AGTAAGGGTGATCAGCTTAAT | 3483 | SKGDQLN | 4726 | 104.166 |
| 991 | GACGGAGAATCCCGATTATCA | 3484 | DGESRLS | 4727 | 104.158 |
| 992 | GGTAATATGAATCATAGTATT | 3485 | GNMNHSI | 4728 | 104.15 |
| 993 | AGTGGGCATGCTTCTCAGGGT | 3486 | SGHASQG | 4729 | 104.148 |
| 994 | GGTTGGAGTAATAATGAGTTG | 3487 | GWSNNEL | 4730 | 104.145 |
| 995 | GGTGTGCATACTCATACTGTT | 3488 | GVHTHTV | 4731 | 104.139 |
| 996 | CACGTGACAGTAACGTTAAAC | 3489 | HVTVTLN | 4732 | 104.124 |
| 997 | ACCCGTGGCAACGACATATCA | 3490 | TRGNDIS | 4733 | 104.058 |
| 998 | AGCAAAGGCGGCGACATGGTT | 3491 | SKGGDMV | 4734 | 104.043 |
| 999 | ACGCATGGTGATCATATTCAG | 3492 | THGDHIQ | 4735 | 104.032 |
| 1000 | ACTACGAATTCTCATGCGATT | 3493 | TTNSHAI | 4736 | 104.021 |
| 1001 | GTCAGAACAGTCCTTCAACAA | 3494 | VRTVLQQ | 4737 | 104.017 |
| 1002 | ACTGTGCGTTCGCCTCAGCCG | 3495 | TVRSPQP | 4738 | 104.015 |
| 1003 | AATACTTATACTGCTGGTAAG | 3496 | NTYTAGK | 4739 | 104.005 |
| 1004 | ATTAGTAATCCGGAGAATACG | 3497 | ISNPENT | 4740 | 103.998 |
| 1005 | ATCGGGTCGCCGTTGGCCAAC | 3498 | IGSPLAN | 4741 | 103.928 |
| 1006 | TATACGGGTACTCTTGTTGTT | 3499 | YTGTLVV | 4742 | 103.911 |
| 1007 | GGGCGGCACACATTAGCGGAC | 3500 | GRHTLAD | 4743 | 103.908 |
| 1008 | ACTGATGGGCCGCGTCTGGCT | 3501 | TDGPRLA | 4744 | 103.881 |
| 1009 | GGGGCAGGAAACCTGGGTACC | 3502 | GAGNLGT | 4745 | 103.873 |
| 1010 | CTGATGAATCGTAATGCTCCT | 3503 | LMNRNAP | 4746 | 103.8648 |
| 1011 | AATGCTATGGCTTCTAGTAGG | 3504 | NAMASSR | 4747 | 103.826 |
| 1012 | CAGCATCGTGCGCAGGATGTG | 3505 | QHRAQDV | 4748 | 103.8248 |
| 1013 | AAAATAGAAAGCGGAACCATA | 3506 | KIESGTI | 4749 | 103.822 |
| 1014 | ACTAATTATCCTGAGGCGAAT | 3507 | TNYPEAN | 4750 | 103.806 |
| 1015 | GTATACCACGGGGTAGCCAGC | 3508 | VYHGVAS | 4751 | 103.803 |
| 1016 | TCCAACGTCCACGTAGTAAAC | 3509 | SNVHVVN | 4752 | 103.791 |
| 1017 | ACATACACCGACGGGAACCCC | 3510 | TYTDGNP | 4753 | 103.788 |
| 1018 | TTTATTGCGAATACGAATCCT | 3511 | FIANTNP | 4754 | 103.787 |
| 1019 | GACGCCGGGTACGGCCACGAC | 3512 | DAGYGHD | 4755 | 103.785 |
| 1020 | GGTCTTAGTCGGAATGATGGT | 3513 | GLSRNDG | 4756 | 103.783 |
| 1021 | ATGATGGGCGCGACAACGAAA | 3514 | MMGATTK | 4757 | 103.779 |
| 1022 | CCCATCAACGTACTCACGACA | 3515 | PINVLTT | 4758 | 103.771 |
| 1023 | GCCGTAGACCAATCACGTTTG | 3516 | AVDQSRL | 4759 | 103.765 |
| 1024 | AACGCTTCTACCTACATGGAC | 3517 | NASTYMD | 4760 | 103.728 |
| 1025 | ACACAAGCAGGTCTTGCGTCA | 3518 | TQAGLAS | 4761 | 103.696 |
| 1026 | GCACAATTCGAATCAGGCCGA | 3519 | AQFESGR | 4762 | 103.693 |
| 1027 | CGGAATGGTGGTACTACGGAT | 3520 | RNGGTTD | 4763 | 103.669 |
| 1028 | GCTAATACGTATAATGTTCAG | 3521 | ANTYNVQ | 4764 | 103.64 |
| 1029 | TCGGGTGTTCATAGTGAGCGT | 3522 | SGVHSER | 4765 | 103.636 |
| 1030 | AACACCGGCACCACGAGTGTC | 3523 | NTGTTSV | 4766 | 103.635 |
| 1031 | AGTACGAGTAATAGTCATATG | 3524 | STSNSHM | 4767 | 103.632 |
| 1032 | GGTGAACAACACAACGCCCCC | 3525 | GEQHNAP | 4768 | 103.629 |
| 1033 | GCTCATCATATGACGACGGAG | 3526 | AHHMTTE | 4769 | 103.614 |
| 1034 | TTGATGACTGGTACTGCGTCG | 3527 | LMTGTAS | 4770 | 103.575 |
| 1035 | GCTGCCGGAGCCGACTCTCCA | 3528 | AAGADSP | 4771 | 103.568 |
| 1036 | GTGTCTCTGAGTTCGCCTCCG | 3529 | VSLSSPP | 4772 | 103.563 |
| 1037 | CGTGTTGTAGCCGGTCCCAAC | 3530 | RVVAGPN | 4773 | 103.534 |
| 1038 | GATAAGACTGAGATGCTGCAG | 3531 | DKTEMLQ | 4774 | 103.525 |
| 1039 | GCACGAGACGACACGATACAA | 3532 | ARDDTIQ | 4775 | 103.523 |
| 1040 | TTACACCTTGGGTTATCATCT | 3533 | LHLGLSS | 4776 | 103.513 |
| 1041 | CTCGAAGGACAACGGGACGTC | 3534 | LEGQRDV | 4777 | 103.505 |
| 1042 | GCGTCGTTGTCGGCTCCGGCG | 3535 | ASLSAPA | 4778 | 103.5036 |
| 1043 | AGCAACCCTGGGAACCACAAC | 3536 | SNPGNHN | 4779 | 103.502 |
| 1044 | GGGCTGAATTCTAAGGGGACT | 3537 | GLNSKGT | 4780 | 103.471 |
| 1045 | AAAACACCCTCAGCTTCAGAA | 3538 | KTPSASE | 4781 | 103.47 |
| 1046 | GTGCTGGCGTCGACTGAGAAG | 3539 | VLASTEK | 4782 | 103.451 |
| 1047 | TCGGTATTGAACAAACCAACA | 3540 | SVLNKPT | 4783 | 103.441 |
| 1048 | CCCGGTAACGGACAAAGTCCG | 3541 | PGNGQSP | 4784 | 103.396 |
| 1049 | ATCTTGATGGGCGCTAGGACA | 3542 | ILMGART | 4785 | 103.385 |
| 1050 | GCACTACCATCCCACTCCTCC | 3543 | ALPSHSS | 4786 | 103.382 |
| 1051 | AGGGATCAGACTCATCCGAAT | 3544 | RDQTHPN | 4787 | 103.378 |
| 1052 | TCTGGTCCGATTCCTGCTGTT | 3545 | SGPIPAV | 4788 | 103.376 |
| 1053 | TACGTGGACGACAACAGTCGC | 3546 | YVDDNSR | 4789 | 103.35 |
| 1054 | TTGACTCGGGGGGTCGCCGCA | 3547 | LTRGVAA | 4790 | 103.334 |
| 1055 | TCTGAGAAGGAGGCTCGGCTG | 3548 | SEKEARL | 4791 | 103.326 |
| 1056 | TCCACAACGCCTCCCTTCAAA | 3549 | STTPPFK | 4792 | 103.308 |
| 1057 | TACTCGACAACCATGCTTAAC | 3550 | YSTTMLN | 4793 | 103.299 |
| 1058 | AAAAACGGTGTTATAAACGAC | 3551 | KNGVIND | 4794 | 103.292 |
| 1059 | TTCGGTATAGGGCACGGAACA | 3552 | FGIGHGT | 4795 | 103.278 |
| 1060 | CCTCTTCATGTTGCTTCTCCT | 3553 | PLHVASP | 4796 | 103.245 |
| 1061 | TTGGGTAATGGTAGTTCTTTG | 3554 | LGNGSSL | 4797 | 103.239 |
| 1062 | AGTGGCAACGCGAACATAGTA | 3555 | SGNANIV | 4798 | 103.225 |
| 1063 | GGGATTAATCGTACTAGTGAG | 3556 | GINRTSE | 4799 | 103.19 |
| 1064 | TCGGATAATAGGAATACTGCG | 3557 | SDNRNTA | 4800 | 103.19 |
| 1065 | CGATTAGGAACCGTCACCAAC | 3558 | RLGTVTN | 4801 | 103.189 |
| 1066 | GTGGAGCATGTTGCTCATCAG | 3559 | VEHVAHQ | 4802 | 103.185 |
| 1067 | TATACTAAGCATCCTGTTGAG | 3560 | YTKHPVE | 4803 | 103.172 |
| 1068 | TCCCGAATCACGGTGAACGCA | 3561 | SRITVNA | 4804 | 103.154 |
| 1069 | ACAGTATCGTCATACGTACAA | 3562 | TVSSYVQ | 4805 | 103.134 |
| 1070 | CGCGCCGAAGGGAGCTCTGGC | 3563 | RAEGSSG | 4806 | 103.127 |
| 1071 | GCTGTGGGGCGGTCGGATGAT | 3564 | AVGRSDD | 4807 | 103.119 |
| 1072 | CGCATAGGCGTTGGAGCACCA | 3565 | RIGVGAP | 4808 | 103.113 |
| 1073 | TACTCAAACCTCGTACTTTCC | 3566 | YSNLVLS | 4809 | 103.095 |
| 1074 | TCGACGAATTCTGAGGCGGTT | 3567 | STNSEAV | 4810 | 103.068 |
| 1075 | GCAATGTCAACCCACATGATA | 3568 | AMSTHMI | 4811 | 103.067 |
| 1076 | AGGGTTGATATTTCGCATTTT | 3569 | RVDISHF | 4812 | 103.049 |
| 1077 | ATTCTTACGCCTTTGGATAAG | 3570 | ILTPLDK | 4813 | 103.039 |
| 1078 | GTTGCGAGTACGACGCAGACT | 3571 | VASTTQT | 4814 | 103.033 |
| 1079 | GACCGTAGCTCCGCGACGCTC | 3572 | DRSSATL | 4815 | 103.014 |
| 1080 | GATCATAGTGAGCAGAATTCG | 3573 | DHSEQNS | 4816 | 102.995 |
| 1081 | ATACGCAGCGAATTGGAAGTA | 3574 | IRSELEV | 4817 | 102.969 |
| 1082 | GCGAATCTGGGTGATGTTGAG | 3575 | ANLGDVE | 4818 | 102.969 |
| 1083 | GAGCTTAAGGAGAGTCAGAAG | 3576 | ELKESQK | 4819 | 102.956 |
| 1084 | TCATACACAGCAGGAAGACCC | 3577 | SYTAGRP | 4820 | 102.953 |
| 1085 | GGACCAGCCTACAACCAAAGC | 3578 | GPAYNQS | 4821 | 102.924 |
| 1086 | CATGAGAGTCATTATGTTAGT | 3579 | HESHYVS | 4822 | 102.921 |
| 1087 | AATGGTAAGCTGGGTACGACT | 3580 | NGKLGTT | 4823 | 102.921 |
| 1088 | CTTCCGCCTGCGTCGGCGGGT | 3581 | LPPASAG | 4824 | 102.917 |
| 1089 | TTGTCGTATCAGACTGGTCAT | 3582 | LSYQTGH | 4825 | 102.916 |
| 1090 | GACAGCCAAATCACAAGACTA | 3583 | DSQITRL | 4826 | 102.909 |
| 1091 | AACGTATACGAAGGGCACCGC | 3584 | NVYEGHR | 4827 | 102.909 |
| 1092 | TTGTTTACTGCTGGGAGTACT | 3585 | LFTAGST | 4828 | 102.863 |
| 1093 | CTTGTGAATAATGATGGGACT | 3586 | LVNNDGT | 4829 | 102.861 |
| 1094 | GCGATGAATGTGCGGAGTGAT | 3587 | AMNVRSD | 4830 | 102.858 |
| 1095 | GCCAGCCTTGACCGCCTTCCA | 3588 | ASLDRLP | 4831 | 102.857 |
| 1096 | GGCTCTCGGAACGGACCCACA | 3589 | GSRNGPT | 4832 | 102.8532 |
| 1097 | ATGAGTGATGGGCATTCGAAG | 3590 | MSDGHSK | 4833 | 102.833 |
| 1098 | TCTAACCGTACGGAAATGCCA | 3591 | SNRTEMP | 4834 | 102.815 |
| 1099 | AACGTGGTGAAAAACAACACA | 3592 | NVVKNNT | 4835 | 102.801 |
| 1100 | GTGGTCGACTCAACATACCCG | 3593 | VVDSTYP | 4836 | 102.793 |
| 1101 | GTGGCTGGGGGGACTTCGGAG | 3594 | VAGGTSE | 4837 | 102.789 |
| 1102 | CGGGCAGACATGACTCCCTTA | 3595 | RADMIPL | 4838 | 102.77 |
| 1103 | GGACACGAACAAACTGACGCA | 3596 | GHEQTDA | 4839 | 102.764 |
| 1104 | AGTGCTTTGATTAGTGTGGTT | 3597 | SALISVV | 4840 | 102.756 |
| 1105 | AACTCGACAACGGCACAATCA | 3598 | NSTTAQS | 4841 | 102.75 |
| 1106 | TACGGCGACCTAACTACAGTC | 3599 | YGDLTTV | 4842 | 102.737 |
| 1107 | GCACGCAACGACGGACAAGGA | 3600 | ARNDGQG | 4843 | 102.734 |
| 1108 | CTGAACGTTAGTTCATCCAAA | 3601 | LNVSSSK | 4844 | 102.693 |
| 1109 | TCTGGCGTCTCGAAAGAACGG | 3602 | SGVSKER | 4845 | 102.692 |
| 1110 | AACATGGAACACACCATGGCG | 3603 | NMEHTMA | 4846 | 102.687 |
| 1111 | GCTCGTCCGGCTTCGTCTGAT | 3604 | ARPASSD | 4847 | 102.6705 |
| 1112 | CTTAGGGAAGAATCTGCACGT | 3605 | LREESAR | 4848 | 102.639 |
| 1113 | TTGGCCAACATGTCCGCACCA | 3606 | LANMSAP | 4849 | 102.61 |
| 1114 | AACCACACGGTAGAAGGACGC | 3607 | NHTVEGR | 4850 | 102.598 |
| 1115 | CCTCAGCATCAGCATGAGCAT | 3608 | PQHQHEH | 4851 | 102.582 |
| 1116 | AATTCTTCGGAGCTGAAGACG | 3609 | NSSELKT | 4852 | 102.564 |
| 1117 | CTTGTTGCTGAGCGTTTGCCG | 3610 | LVAERLP | 4853 | 102.552 |
| 1118 | AACGTTATGCACTCTTCCTCC | 3611 | NVMHSSS | 4854 | 102.525 |
| 1119 | GCGAGTGATAAGGGGGCGAAT | 3612 | ASDKGAN | 4855 | 102.509 |
| 1120 | AGTCTGGATCGGAAGCCTCCG | 3613 | SLDRKPP | 4856 | 102.5032 |
| 1121 | ACAGAACACGAAAAATCCACT | 3614 | TEHEKST | 4857 | 102.459 |
| 1122 | CCTCATAATCAGGAGATGGGT | 3615 | PHNQEMG | 4858 | 102.449 |
| 1123 | GAGTCTAAGACTGTGGTTATT | 3616 | ESKTVVI | 4859 | 102.442 |
| 1124 | TCGACGGGCCAAAACTTAAAA | 3617 | STGQNLK | 4860 | 102.442 |
| 1125 | GTTCTTCATGTTTCTGATGTT | 3618 | VLHVSDV | 4861 | 102.441 |
| 1126 | CCTGACGCAGCGCGTAGCCCG | 3619 | PDAARSP | 4862 | 102.421 |
| 1127 | GCTCCTCGGCATGCTCATCCT | 3620 | APRHAHP | 4863 | 102.414 |
| 1128 | CATGTGAATCCTACGCCGGCG | 3621 | HVNPTPA | 4864 | 102.401 |
| 1129 | TTGCCTAATGAGCGTCCGGGT | 3622 | LPNERPG | 4865 | 102.397 |
| 1130 | GAGGCTAAGGGTTTTGGTCAT | 3623 | EAKGFGH | 4866 | 102.395 |
| 1131 | TCAGAAAACACCTCTGTACCC | 3624 | SENTSVP | 4867 | 102.388 |
| 1132 | GGTCCCGGAGAAAACTACCGA | 3625 | GPGENYR | 4868 | 102.375 |
| 1133 | TCTCATGAGATGAATAATGGT | 3626 | SHEMNNG | 4869 | 102.366 |
| 1134 | GTAGACACCTACAGCGGTCTG | 3627 | VDTYSGL | 4870 | 102.35 |
| 1135 | GGAGTCCTAGGAAACATGGTA | 3628 | GVLGNMV | 4871 | 102.325 |
| 1136 | GCGCTGGATAATAGTAGTCGG | 3629 | ALDNSSR | 4872 | 102.322 |
| 1137 | TTTCTGGGTTCTAGTAATCAT | 3630 | FLGSSNH | 4873 | 102.321 |
| 1138 | CCTGTGGTTCATGGTGAGCCT | 3631 | PVVHGEP | 4874 | 102.3142 |
| 1139 | CGCAGGGAAGGTATCCTAATG | 3632 | RREGILM | 4875 | 102.305 |
| 1140 | CAGCAGGGGGCGCCTACTTCT | 3633 | QQGAPTS | 4876 | 102.303 |
| 1141 | AAGGTTAGTGGTGGGGAGACG | 3634 | KVSGGET | 4877 | 102.275 |
| 1142 | GCGAAACACGAAAGCTCGTCT | 3635 | AKHESSS | 4878 | 102.272 |
| 1143 | ATTCTTATGGGTGCGCGTACT | 3636 | ILMGART | 4879 | 102.235 |
| 1144 | ACGCTAGGCAGCAGCAGCACC | 3637 | TLGSSST | 4880 | 102.222 |
| 1145 | CTAAGATCTGAACCGACACAA | 3638 | LRSEPTQ | 4881 | 102.218 |
| 1146 | CGCTCGGAACAAAAAACTCCG | 3639 | RSEQKTP | 4882 | 102.207 |
| 1147 | CACGCTCCAAGCGGCGCCATA | 3640 | HAPSGAI | 4883 | 102.2 |
| 1148 | AGTAGTGTTACTTCGAGGGAG | 3641 | SSVTSRE | 4884 | 102.197 |
| 1149 | GTGAATCCGCATCCTGCGCAG | 3642 | VNPHPAQ | 4885 | 102.185 |
| 1150 | CAATACTCGATGGACACGCGC | 3643 | QYSMDTR | 4886 | 102.173 |
| 1151 | ACTCCTGGTGTTACTAGGACG | 3644 | TPGVTRT | 4887 | 102.172 |
| 1152 | CTTTATGAGGTTGGTACTCCT | 3645 | LYEVGTP | 4888 | 102.165 |
| 1153 | ACGATGACGAGTGAGCTTTCG | 3646 | TMTSELS | 4889 | 102.16 |
| 1154 | TCAGGTTCGGAATACCGTACC | 3647 | SGSEYRT | 4890 | 102.153 |
| 1155 | GAAATGCAAACCAAAAACGCC | 3648 | EMQTKNA | 4891 | 102.144 |
| 1156 | GGCCACGAAAACATGGGCGTG | 3649 | GHENMGV | 4892 | 102.135 |
| 1157 | GGGGCGCATACGTCGGCTTCG | 3650 | GAHTSAS | 4893 | 102.116 |
| 1158 | GCTGATACGCTGCTGCGTAGG | 3651 | ADTLLRR | 4894 | 102.095 |
| 1159 | GACAACAGCAACAACGTCCCA | 3652 | DNSNNVP | 4895 | 102.092 |
| 1160 | ATGACTGCTAACTTGGTGGAA | 3653 | MTANLVE | 4896 | 102.076 |
| 1161 | GAAGCGGGACGCACGCTTCAA | 3654 | EAGRTLQ | 4897 | 102.07 |
| 1162 | AGACACGTCGTCCCCGACTCC | 3655 | RHVVPDS | 4898 | 102.039 |
| 1163 | GTGAGTTCTGAGCAGTATAGG | 3656 | VSSEQYR | 4899 | 102.03 |
| 1164 | GGTATCGAAGCAAGTCGCGGA | 3657 | GIEASRG | 4900 | 102.008 |
| 1165 | AGACAAGGCGTGAACGGAGTA | 3658 | RQGVNGV | 4901 | 101.991 |
| 1166 | ACTGTGATGATGAGTACGAGG | 3659 | TVMMSTR | 4902 | 101.976 |
| 1167 | TGGCAAGACCACAACAAAGTC | 3660 | WQDHNKV | 4903 | 101.948 |
| 1168 | GGAATCACAGGATCAACAGGA | 3661 | GITGSTG | 4904 | 101.943 |
| 1169 | AATTATGCTCAGAGGGATGGT | 3662 | NYAQRDG | 4905 | 101.936 |
| 1170 | AAACAAGAAGCTCTGTCCTCA | 3663 | KQEALSS | 4906 | 101.872 |
| 1171 | TCAACTTTAGACCGAAGCGAA | 3664 | STLDRSE | 4907 | 101.8665 |
| 1172 | GCGATTACGAATACGCAGCAG | 3665 | AITNTQQ | 4908 | 101.8615 |
| 1173 | AGGCTGGCGACTCAGAGTGCT | 3666 | RLATQSA | 4909 | 101.847 |
| 1174 | TGGCAGCTTACGACGAGTCAT | 3667 | WQLTTSH | 4910 | 101.775 |
| 1175 | GGTGGTAGTGGTTCTAATACT | 3668 | GGSGSNT | 4911 | 101.759 |
| 1176 | AACTTAGTAGCGTACACGAAA | 3669 | NLVAYTK | 4912 | 101.732 |
| 1177 | AAGGCTTCGCATGATACTAGT | 3670 | KASHDTS | 4913 | 101.721 |
| 1178 | GCCATAACGATAATAGGCACT | 3671 | AITIIGT | 4914 | 101.711 |
| 1179 | AACGCATCGTCGGACCGCTTC | 3672 | NASSDRF | 4915 | 101.686 |
| 1180 | GAAACGCAACGTATCGAACTG | 3673 | ETQRIEL | 4916 | 101.636 |
| 1181 | GTGATTGAGGTTAATTCGCGT | 3674 | VIEVNSR | 4917 | 101.614 |
| 1182 | GATAGGGATATGGAGGGTGTT | 3675 | DRDMEGV | 4918 | 101.609 |
| 1183 | ATTTCGGAGATGACGCGGTAT | 3676 | ISEMTRY | 4919 | 101.59 |
| 1184 | GAGCATGATGTGAGTACGCGT | 3677 | EHDVSTR | 4920 | 101.539 |
| 1185 | CGTATGGAGGAGACTGCTTAT | 3678 | RMEETAY | 4921 | 101.533 |
| 1186 | TATAGTACTGATCTTAGGATG | 3679 | YSTDLRM | 4922 | 101.52 |
| 1187 | GTGCCTGAGCCTAAGAAGGCG | 3680 | VPEPKKA | 4923 | 101.495 |
| 1188 | ACTTATGCGCCTAGGTCGCCT | 3681 | TYAPRSP | 4924 | 101.484 |
| 1189 | GCTGCGGCTTCGCCTTTGGCT | 3682 | AAASPLA | 4925 | 101.484 |
| 1190 | AGTGGGACGTATGCTAGTCGT | 3683 | SGTYASR | 4926 | 101.456 |
| 1191 | ACTGAAGCATCAATCGCGGCG | 3684 | TEASIAA | 4927 | 101.456 |
| 1192 | CGCATCGTAGACACGTTGGGA | 3685 | RPVDTLG | 4928 | 101.447 |
| 1193 | TATCTGCAGGAGAAGTTTCCT | 3686 | YLQEKFP | 4929 | 101.437 |
| 1194 | GTTCATGATCAGGGGGCTGGG | 3687 | VHDQGAG | 4930 | 101.436 |
| 1195 | CCCCAAGCCACTCTCAACAAC | 3688 | PQATLNN | 4931 | 101.432 |
| 1196 | TGCGGAATGTCCGAATGCTCG | 3689 | CGMSECS | 4932 | 101.429 |
| 1197 | GGTTCGCACAACGGGCCGACA | 3690 | GSHNGPT | 4933 | 101.429 |
| 1198 | TTTGGGTCTGGGCCGAATCTT | 3691 | FGSGPNL | 4934 | 101.413 |
| 1199 | ATGGATACGAATACGCATCGT | 3692 | MDTNTHR | 4935 | 101.411 |
| 1200 | AAGAATAATCCTGAGGATGGT | 3693 | KNNPEDG | 4936 | 101.41 |
| 1201 | CTGCCTACGGCTACTGGTCAG | 3694 | LPTATGQ | 4937 | 101.406 |
| 1202 | ACGGCTGAGCGTACTGAGTAT | 3695 | TAERTEY | 4938 | 101.383 |
| 1203 | AACTACAGGGACATCACAATG | 3696 | NYRDITM | 4939 | 101.375 |
| 1204 | CCCGCGAGAAGCGACGCCCTT | 3697 | PARSDAL | 4940 | 101.359 |
| 1205 | TCCGTTGTAACTCTTGGGGTG | 3698 | SWTLGV | 4941 | 101.324 |
| 1206 | GTTGTTAAGGAGATTAAGCTG | 3699 | VVKEIKL | 4942 | 101.324 |
| 1207 | GACCACTCGAAACAAAACTCT | 3700 | DHSKQNS | 4943 | 101.293 |
| 1208 | CAGTCTAATTTGGTTATTAAT | 3701 | QSNLVIN | 4944 | 101.292 |
| 1209 | ATTCCGGTTGGGGCGATGGCT | 3702 | IPVGAMA | 4945 | 101.286 |
| 1210 | ACGTCGGAGATGCGTACTGCT | 3703 | TSEMRTA | 4946 | 101.255 |
| 1211 | GGTAGTCAGCGTGCTATGAAT | 3704 | GSQRAMN | 4947 | 101.251 |
| 1212 | CACCTGTCACAAGCAAACCAC | 3705 | HLSQANH | 4948 | 101.24 |
| 1213 | GGAGGGAACTCCCACGGGGTA | 3706 | GGNSHGV | 4949 | 101.219 |
| 1214 | GTGACTCGTAGTACGAAGGAG | 3707 | VTRSTKE | 4950 | 101.178 |
| 1215 | ATGCTCAGAGCAAGCACCGCC | 3708 | MLRASTA | 4951 | 101.171 |
| 1216 | GGCAGGCAAATACCAGAACAA | 3709 | GRQIPEQ | 4952 | 101.146 |
| 1217 | TGGAATCAGAATGTGTCTCAT | 3710 | WNQNVSH | 4953 | 101.125 |
| 1218 | CAGCGGGGGGAGCTTCCTGCG | 3711 | QRGELPA | 4954 | 101.114 |
| 1219 | GCGAATGATAGTTTGCGTTCT | 3712 | ANDSLRS | 4955 | 101.079 |
| 1220 | AACATGCCACCGGAATCGCAC | 3713 | NMPPESH | 4956 | 101.037 |
| 1221 | AATTTGAGTCTTCAGAGTCTG | 3714 | NLSLQSL | 4957 | 101.03 |
| 1222 | ACATCAGACGGTCTACTAAGT | 3715 | TSDGLLS | 4958 | 101.028 |
| 1223 | GCGGGCCAAGCGTACCAATCC | 3716 | AGQAYQS | 4959 | 101.016 |
| 1224 | CTGAGTGTGAAGGAGGAGATT | 3717 | LSVKEEI | 4960 | 101.007 |
| 1225 | GATAATAGTCCTGCTAATCAT | 3718 | DNSPANH | 4961 | 100.9812 |
| 1226 | ATGCACAACCTACCCTCATAC | 3719 | MHNLPSY | 4962 | 100.9629 |
| 1227 | TACCAAGCCTCAAACAACAGT | 3720 | YQASNNS | 4963 | 100.9594 |
| 1228 | GCGCGGGCAGAAGGGGTCTTC | 3721 | ARAEGVF | 4964 | 100.9325 |
| 1229 | GGCCGAGAAGGAAACCTACCA | 3722 | GREGNLP | 4965 | 100.913 |
| 1230 | CAAGCTGCAGAAAGGGACAGA | 3723 | QAAERDR | 4966 | 100.8877 |
| 1231 | GTTGAGAATAATCGTATGAGT | 3724 | VENNRMS | 4967 | 100.8183 |
| 1232 | AATATGTCGCATAGTACTCTG | 3725 | NMSHSTL | 4968 | 100.7704 |
| 1233 | TCTTCGTTGGGTCTTGCTCCG | 3726 | SSLGLAP | 4969 | 100.7249 |
| 1234 | AACGTCGCTCCCTACAGTAGC | 3727 | NVAPYSS | 4970 | 100.7069 |
| 1235 | AGGCCTGCGCAGCTGCCTGAG | 3728 | RPAQLPE | 4971 | 100.615 |
| 1236 | ATGTCGGGTTCTGGGAACGCA | 3729 | MSGSGNA | 4972 | 100.597 |
| 1237 | CACGGGGGGGAACACCGGAAC | 3730 | HGGEHRN | 4973 | 100.5793 |
| 1238 | GCATCCGGCGCACGCTACGTC | 3731 | ASGARYV | 4974 | 100.5302 |
| 1239 | CAAAACCACGCGTCTGGTGAA | 3732 | QNHASGE | 4975 | 100.499 |
| 1240 | GCACACCAAAAAGACCTACGC | 3733 | AHQKDLR | 4976 | 100.4529 |
| 1241 | TTTGGGAAGGTTGGTACTGCT | 3734 | FGKVGTA | 4977 | 100.433 |
| 1242 | CTGCAGAAGTCGACTCTGGCT | 3735 | LQKSTLA | 4978 | 100.3439 |
| 1243 | ATTCATAATGAGTCTTATGGT | 3736 | MNESYG | 4979 | 100.15 |

TABLE 3
MHCK7/CK8 Combined Results mRNA Second Round of Capsid Variant
Selection in C57BL6 mice-score capped at 100

| Variant | | | | | |
|---|---|---|---|---|---|
| ID for | | SEQ ID | Amino Acid | SEQ ID | Sum of muscle mRNA |
| Table | Nucleotide Sequence | NO: | seq. | NO: | score_capped at 100 |
| 1 | AGGGGTGATCTTTCTACGCCT | 4980 | RGDLSTP | 6647 | 856.3525 |
| 2 | AGAGGCGACTTATCCACACCC | 4981 | RGDLSTP | 6648 | 732.672 |
| 3 | AGAGGAGACTTGACAACCCCA | 4982 | RGDLTTP | 6649 | 683.373 |
| 4 | AGGGGCGACCTGAACCAATAC | 4983 | RGDLNQY | 6650 | 680.6265 |
| 5 | CGGGGTGATCAGCTTTATCAT | 4984 | RGDQLYH | 6651 | 624.3915 |
| 6 | AGGGGGGATGCGACGGAGCTT | 4985 | RGDATEL | 6652 | 620.5 |
| 7 | CGAGGAGACACCATGAGCAAA | 4986 | RGDTMSK | 6653 | 599.497 |
| 8 | CGGGGTGATCTTAATCAGTAT | 4987 | RGDLNQY | 6654 | 579.731 |
| 9 | CGGGGTGATCTTACTACGCCT | 4988 | RGDLTTP | 6655 | 531.1525 |
| 10 | CGCGGCGACATGATAAACACC | 4989 | RGDMINT | 6656 | 528.2405 |
| 11 | CGGGGGGATACTATGTCTAAG | 4990 | RGDTMSK | 6657 | 469.5075 |
| 12 | CGAGGCGACACAATGAACTAC | 4991 | RGDTMNY | 6658 | 412.3247 |
| 13 | CGGGGTGACGCAACAGAATTG | 4992 | RGDATEL | 6659 | 408.0865 |
| 14 | CGTTTGGACCTGCAAGTCCAC | 4993 | RLDLQVH | 6660 | 397.178 |
| 15 | CGTGGTGATGTGGCGGCTAAG | 4994 | RGDVAAK | 6661 | 395.174 |
| 16 | AGGGGCGACCTCAACGACAGC | 4995 | RGDLNDS | 6662 | 360.4535 |
| 17 | CGTGGGGATTTGAATGATTCT | 4996 | RGDLNDS | 6663 | 349.6835 |
| 18 | TCTTATGGTAATACTCATGAT | 4997 | SYGNTHD | 6664 | 326.826 |
| 19 | CGTTTGGACCTGCAAGTCAAC | 4998 | RLDLQVN | 6665 | 317.78 |
| 20 | AAAGCGGGACAACTAGTGGAA | 4999 | KAGQLVE | 6666 | 317.023 |
| 21 | GATCAGACGGCTAGTATTGTT | 5000 | DQTASIV | 6667 | 313.224 |
| 22 | TATATTGCTGCGGGTGAGCAG | 5001 | YIAAGEQ | 6668 | 308.738 |
| 23 | GCGGTTGTTCTGAATAGTAAT | 5002 | AWLNSN | 6669 | 307.8445 |
| 24 | TCTAAAGGAAACGAACAAATG | 5003 | SKGNEQM | 6670 | 305.016 |
| 25 | GCAAACCCCAACATACTAGAC | 5004 | ANPNILD | 6671 | 302.02 |
| 26 | CACAACAAACCAAACGGAGAC | 5005 | HNKPNGD | 6672 | 297.851 |
| 27 | GATAAGACTGAGATGCTGCAG | 5006 | DKTEMLQ | 6673 | 294.655 |
| 28 | ACAGAACAATCTTACTCACGA | 5007 | TEQSYSR | 6674 | 290.3555 |
| 29 | ACTGTGATGATGAGTACGAGG | 5008 | TVMMSTR | 6675 | 289.3945 |
| 30 | GTCTCTACATACCTCCTGGCA | 5009 | VSTYLLA | 6676 | 286.859 |
| 31 | CCTAATGTTACGCAGTCTTAT | 5010 | PNVTQSY | 6677 | 285.178 |
| 32 | ATGAGTAATTTGGGGTATGAG | 5011 | MSNLGYE | 6678 | 284 |
| 33 | ACGATGGGTGCTAATGGTACT | 5012 | TMGANGT | 6679 | 278.291 |
| 34 | AATGTTAATGCGCAGAGTAGG | 5013 | NVNAQSR | 6680 | 275.45 |
| 35 | GACCAAAACTTCGAACGTAGA | 5014 | DQNFERR | 6681 | 274.6045 |
| 36 | AACACGTACACACCGGGAAAA | 5015 | NTYTPGK | 6682 | 273.83545 |
| 37 | CGTGGGGATATGATTAATACG | 5016 | RGDMINT | 6683 | 270.333 |
| 38 | GCACAATTCGAATCAGGCCGA | 5017 | AQFESGR | 6684 | 267.7345 |
| 39 | ACGGCGTATCAGGCTGGTCTG | 5018 | TAYQAGL | 6685 | 267.054 |
| 40 | AGTGTTAGTTCTGTGGTGTTG | 5019 | SVSSVVL | 6686 | 266.91 |
| 41 | GGGCTTTCTAAGGCGTCTGAT | 5020 | GLSKASD | 6687 | 266.825 |
| 42 | TGGAACGGAAACGCCACACAA | 5021 | WNGNATQ | 6688 | 265.11 |
| 43 | ACAGCCGGCGGCGAACGCGCC | 5022 | TAGGERA | 6689 | 258.785 |
| 44 | TACACCTCTCAAACCAGCACT | 5023 | YTSQTST | 6690 | 258.1818 |
| 45 | GCGAACATAGAAAACACGTCA | 5024 | ANIENTS | 6691 | 257.015 |
| 46 | GAACTCTCCGTTCCGAAACCA | 5025 | ELSVPKP | 6692 | 255.133 |
| 47 | GATCCTGGTCGGACGGGTACG | 5026 | DPGRTGT | 6693 | 254.7 |
| 48 | GATCGTCCGAATAATATGACG | 5027 | DRPNNMT | 6694 | 254.383 |
| 49 | TATAGTACTGATCTTAGGATG | 5028 | YSTDLRM | 6695 | 252.146 |
| 50 | CAGTCGGTTAATAGTACGAGT | 5029 | QSVNSTS | 6696 | 251.508 |
| 51 | GCGGCACAACTCGTCAGTCCA | 5030 | AAQLVSP | 6697 | 250.413 |
| 52 | CTCGGAGGAAACAGCAGGTTC | 5031 | LGGNSRF | 6698 | 247.9775 |
| 53 | GCGACGCTGAATAATAGTTAT | 5032 | ATLNNSY | 6699 | 247.2955 |
| 54 | CGCTTGGACGTTGGAAGCCCG | 5033 | RLDVGSP | 6700 | 245.839 |
| 55 | TATCGGGGTAGGGAGGATTGG | 5034 | YRGREDW | 6701 | 244.83 |
| 56 | AGGGGAGATCTTTCTACGCCT | 5035 | RGDLSTP | 6702 | 243.25 |
| 57 | AGTGGTCTTTCGCATGGTCAG | 5036 | SGLSHGQ | 6703 | 242.486 |
| 58 | GAACACGCTACAGCAAAACAA | 5037 | EHATAKQ | 6704 | 241.816 |
| 59 | GGGGCGGAAGCGGGCCGCCAA | 5038 | GAEAGRQ | 6705 | 241.46345 |
| 60 | ATAAGCGGTTCCACTACACAC | 5039 | ISGSTTH | 6706 | 240.8811 |
| 61 | GGCACCGTCGTTCCGGGCTCC | 5040 | GTVVPGS | 6707 | 240.8455 |
| 62 | CATAATAATAATATGCTGAAT | 5041 | HNNNMLN | 6708 | 239.0755 |
| 63 | CGTCTGACTGATACTATGCAT | 5042 | RLTDTMH | 6709 | 238.939 |
| 64 | AACACCTACCCCTTCAACGCC | 5043 | NTYPFNA | 6710 | 235.89 |
| 65 | TCAACCACTACTGGCCACATG | 5044 | STTTGHM | 6711 | 231.581 |
| 66 | GTGCATAATCCTACTACTACG | 5045 | VHNPTTT | 6712 | 231.5537 |
| 67 | AATCTGCAGGTGAATGCGAAT | 5046 | NLQVNAN | 6713 | 231.172 |
| 68 | AGATACGGAGAATCCATCGAA | 5047 | RYGESIE | 6714 | 230.66 |
| 69 | AATACTACTCCGCCTAATCAT | 5048 | NTTPPNH | 6715 | 230.225 |
| 70 | AATACTTTGCAGAATAGTCAT | 5049 | NTLQNSH | 6716 | 229.0666 |
| 71 | AGTCTGAACAACATGGGATCG | 5050 | SLNNMGS | 6717 | 228.9154 |
| 72 | AGAAACGAAAACGTAAACGCT | 5051 | RNENVNA | 6718 | 228.828 |
| 73 | GCTGTGCATGCGACTAGTAGT | 5052 | AVHATSS | 6719 | 227.882 |
| 74 | ACCCAACACCTACCATCCACA | 5053 | TQHLPST | 6720 | 227.0845 |
| 75 | AGTGTGTTGTCTCAGGCTAAT | 5054 | SVLSQAN | 6721 | 225.4035 |
| 76 | AGTAGCTCAACTGAAGGGCAA | 5055 | SSSTEGQ | 6722 | 224.971 |
| 77 | GGTCGGACGGATACTCCTAAT | 5056 | GRTDTPN | 6723 | 224.945 |
| 78 | GTTCAAACCCACATAGGAGTC | 5057 | VQTHIGV | 6724 | 224.616 |
| 79 | ACTTCTGCTAGTGAGAATTGG | 5058 | TSASENW | 6725 | 224.608 |
| 80 | GGAAAAGCCAACGACGGTTCT | 5059 | GKANDGS | 6726 | 224.5935 |
| 81 | GTGGAGCGGAATACTGATATG | 5060 | VERNTDM | 6727 | 223.9975 |
| 82 | CAAAACCACGCGTCTGGTGAA | 5061 | QNHASGE | 6728 | 223.871 |
| 83 | TATTATGAGAAGCTTAGTGCG | 5062 | YYEKLSA | 6729 | 222.1725 |
| 84 | TTCATCGCTAACACTAACCCA | 5063 | FIANTNP | 6730 | 221.76 |
| 85 | ACCTCCACGGCTTCAAAACAA | 5064 | TSTASKQ | 6731 | 221.617 |
| 86 | AATAATGATAATGGTTTTGTT | 5065 | NNDNGFV | 6732 | 220.61 |
| 87 | GCTAATTCTATTGGGGGTCCG | 5066 | ANSIGGP | 6733 | 220.304 |
| 88 | ACTGGCCAATTAGTAGGAACC | 5067 | TGQLVGT | 6734 | 220.262 |
| 89 | TACAGTCAATCGCTGTCTGAA | 5068 | YSQSLSE | 6735 | 220.02 |
| 90 | GTCTACAACGGCAACGTAGTA | 5069 | VYNGNVV | 6736 | 219.824 |
| 91 | AACTCGGCTGAATCCTCGAGA | 5070 | NSAESSR | 6737 | 219.5415 |
| 92 | ACGCGTAATTTGTCTGAGAGT | 5071 | TRNLSES | 6738 | 218.919 |
| 93 | TCTATGTCTGATGGGCTTCGG | 5072 | SMSDGLR | 6739 | 218.868 |
| 94 | GTAGGCGACCAATCCCGCCCG | 5073 | VGDQSRP | 6740 | 218.8565 |
| 95 | TTTACGGTGAATCAGGATCTT | 5074 | FTVNQDL | 6741 | 218.069 |
| 96 | TATCATAAGTATAGTACGGAT | 5075 | YHKYSTD | 6742 | 217.64 |
| 97 | TATGGTGTGCAGGCGAATAGT | 5076 | YGVQANS | 6743 | 217.293 |
| 98 | TTGCAGACGCCTGGGACGACG | 5077 | LQTPGTT | 6744 | 217.179 |
| 99 | TATCAGCAGACTTCTAGTACG | 5078 | YQQTSST | 6745 | 216.8135 |
| 100 | CAAACGAACACCAACGACAGA | 5079 | QTNTNDR | 6746 | 216.664 |
| 101 | ATGGATAAGTCTAATAATTCT | 5080 | MDKSNNS | 6747 | 216.638 |
| 102 | CATCTTAGTCAGGCTAATCAT | 5081 | HLSQANH | 6748 | 216.575 |
| 103 | GTTGGTGCGAGTACGGCTTCG | 5082 | VGASTAS | 6749 | 215.9195 |
| 104 | CACAACAACAACCTGCAAAAC | 5083 | HNNNLQN | 6750 | 215.084 |
| 105 | AGTACTTATGGGAATACTTAT | 5084 | STYGNTY | 6751 | 214.971 |
| 106 | CGGGCTGATGTTTCTTGGTCT | 5085 | RADVSWS | 6752 | 214.499 |
| 107 | CGAGGAGACAACAGCACACCG | 5086 | RGDNSTP | 6753 | 214.29 |
| 108 | GGTCGGGATTATGCTATGAGT | 5087 | GRDYAMS | 6754 | 214.166 |
| 109 | CCTAACAACGAAAAAAACCCG | 5088 | PNNEKNP | 6755 | 214.048 |
| 110 | GATAATGTGAATTCTCAGCCT | 5089 | DNVNSQP | 6756 | 213.6615 |
| 111 | ATGGGGACTGAGTATCGTATG | 5090 | MGTEYRM | 6757 | 213.606 |
| 112 | AATCAGAGTATTAATAATATT | 5091 | NQSINNI | 6758 | 213.36 |
| 113 | GCCATAGACTCTATCAAACAA | 5092 | AIDSIKQ | 6759 | 213.304 |
| 114 | GTTGAGTCTTCTTATTCTCGG | 5093 | VESSYSR | 6760 | 212.9405 |
| 115 | GGTCAGTATAGTCAGACGCTT | 5094 | GQYSQTL | 6761 | 212.242 |
| 116 | ACCATCCAAGACCACATAAAA | 5095 | TIQDHIK | 6762 | 212.116 |
| 117 | AACAGTTCCCAATGGCCCAAC | 5096 | NSSQWPN | 6763 | 211.938 |
| 118 | ACGGATAATGGTCTTCTTGTG | 5097 | TDNGLLV | 6764 | 211.787 |
| 119 | GTAAGAGAAACCACACACCTC | 5098 | VRETTHL | 6765 | 211.44 |
| 120 | CGTGGTGATATGACTCGTGCG | 5099 | RGDMTRA | 6766 | 211.181 |
| 121 | ACTTATGGTATTACTCATGAT | 5100 | TYGITHD | 6767 | 210.641 |
| 122 | ACGGCGCTGAATACGTATCCT | 5101 | TALNTYP | 6768 | 210.568 |
| 123 | GGTGGCGAAAACAGAACCCCA | 5102 | GGENRTP | 6769 | 210.4 |
| 124 | TATCTGCAGGAGAAGTTTCCT | 5103 | YLQEKFP | 6770 | 210.3715 |
| 125 | CTTAATCTTACTAATCATAAT | 5104 | LNLTNHN | 6771 | 209.727 |
| 126 | GGATTAGCTAGTCTACACCTG | 5105 | GLASLHL | 6772 | 209.3585 |
| 127 | GTAGAACACGTAGCCCACCAA | 5106 | VEHVAHQ | 6773 | 209.322 |
| 128 | AGCGAACACCACGCCGGAATA | 5107 | SEHHAGI | 6774 | 209.188 |
| 129 | GAAGCGTCCAACTACGAACGA | 5108 | EASNYER | 6775 | 208.926 |
| 130 | CCCTCCAACAGTGAAAGATTC | 5109 | PSNSERF | 6776 | 208.6635 |
| 131 | TCCCCCGGCAACGGGTTGCTA | 5110 | SPGNGLL | 6777 | 208.4985 |
| 132 | ATACTGAAATCCGACGCACCA | 5111 | ILKSDAP | 6778 | 208.297 |
| 133 | TTTGATAGTGCGAATGGTCGG | 5112 | FDSANGR | 6779 | 208.26 |
| 134 | GATGGTAAGACTACGTCTAAT | 5113 | DGKTTSN | 6780 | 207.768 |
| 135 | ACTAATTATCCTGAGGCGAAT | 5114 | TNYPEAN | 6781 | 207.706 |
| 136 | CGAGGAGACCACAGCACACCG | 5115 | RGDHSTP | 6782 | 207.4315 |
| 137 | CAGACGACTATTCTGGCTGCT | 5116 | QTTILAA | 6783 | 207.223 |
| 138 | GCTACTGCGCATCAGGATGGT | 5117 | ATAHQDG | 6784 | 207.212 |
| 139 | CAAGCCCTGGCCACCACAAAC | 5118 | QALATTN | 6785 | 207.096 |
| 140 | TATAATGCTACTCCTTCGCAG | 5119 | YNATPSQ | 6786 | 206.964 |
| 141 | GAGCTGTCTACTCCTATGGTT | 5120 | ELSTPMV | 6787 | 206.8655 |
| 142 | ATTAATATTAGTAGTGATTTT | 5121 | INISSDF | 6788 | 206.753 |
| 143 | GTAACGGCACACCAATTATCC | 5122 | VTAHQLS | 6789 | 206.7385 |
| 144 | GGAGAAAGCTCCTCAATAAGC | 5123 | GESSSIS | 6790 | 206.656 |
| 145 | GAATCCCTCCCAATCTCTAAA | 5124 | ESLPISK | 6791 | 206.576 |
| 146 | ACGAATGTTAGTACGCTTTTG | 5125 | TNVSTLL | 6792 | 206.455 |
| 147 | TGGCAGACGAATGGTATGCAG | 5126 | WQTNGMQ | 6793 | 206.4378 |
| 148 | TACAGGATGGAAACGAACCCA | 5127 | YRMETNP | 6794 | 206.121 |
| 149 | ATAACCGGCAACACCGTCGGA | 5128 | ITGNTVG | 6795 | 205.9135 |
| 150 | CTGAACACTCTAATCCACAAA | 5129 | LNTLIHK | 6796 | 205.873 |
| 151 | GGGACTTCCTTGGAAAACCGA | 5130 | GTSLENR | 6797 | 205.8535 |
| 152 | TACCAACACAACCAAGCCCAC | 5131 | YQHNQAH | 6798 | 205.473 |
| 153 | ATTGAGAGTAAGACTGTGCAG | 5132 | IESKTVQ | 6799 | 205.0365 |
| 154 | TATACGCAGGGTATTATGAAT | 5133 | YTQGIMN | 6800 | 204.5275 |
| 155 | AGTACGAATGAGGCTCCTAAG | 5134 | STNEAPK | 6801 | 204.522 |
| 156 | TTGTCTCAGAATTTTAATCCT | 5135 | LSQNFNP | 6802 | 204.3926 |
| 157 | TACTCTTCTGAAATGAGCGAA | 5136 | YSSEMSE | 6803 | 204.31 |
| 158 | TCATACGGAGGATCTGGCCCC | 5137 | SYGGSGP | 6804 | 204.28 |
| 159 | ATGGACGCTGCGTACGGTAGT | 5138 | MDAAYGS | 6805 | 203.959 |
| 160 | CCTTTTAATCCTGGGAATGTG | 5139 | PFNPGNV | 6806 | 203.2041 |
| 161 | CAAAAATCGGAAACCTACACT | 5140 | QKSETYT | 6807 | 203.1248 |
| 162 | AACAAAGACCACAACCACCTG | 5141 | NKDHNHL | 6808 | 202.8605 |
| 163 | CTAACCGGCTCTGACATGAAA | 5142 | LTGSDMK | 6809 | 202.379 |
| 164 | TCTAAGGATAGTACTATGTAT | 5143 | SKDSTMY | 6810 | 202.335 |
| 165 | GAAGCATTCCCGCGAGCGGGC | 5144 | EAFPRAG | 6811 | 202.275 |
| 166 | GAACACACTCACTTAAACCCG | 5145 | EHTHLNP | 6812 | 201.959 |
| 167 | AGTTCGGACCCAAAAGGTCAA | 5146 | SSDPKGQ | 6813 | 201.825 |
| 168 | AAAACCATCGACATAGCACAA | 5147 | KTIDIAQ | 6814 | 201.699 |
| 169 | ACCGGTAGCTTGAACTCTATG | 5148 | TGSLNSM | 6815 | 201.671 |
| 170 | ATGCAACGCGAAGACGCGAAC | 5149 | MQREDAN | 6816 | 201.523 |
| 171 | GCCTCTACAGTCTCACTCTAC | 5150 | ASTVSLY | 6817 | 201.407 |
| 172 | GGCCGTGACGACCTCACAAAC | 5151 | GRDDLTN | 6818 | 200.911 |
| 173 | TCTAATCCGGGTAATCATAAT | 5152 | SNPGNHN | 6819 | 200.872 |
| 174 | GATACTTATAAGGGTAAGTGG | 5153 | DTYKGKW | 6820 | 200.7787 |
| 175 | CCACCCAACGGCAGCAGTAGA | 5154 | PPNGSSR | 6821 | 200.32615 |
| 176 | GCTTCTTATAGTATTTCTGAT | 5155 | ASYSISD | 6822 | 200.269 |
| 177 | GTGACTGTTAGTCTGGATGGG | 5156 | VTVSLDG | 6823 | 200.021 |
| 178 | ATGGCCATAGGCCACTCCCCA | 5157 | MAIGHSP | 6824 | 200 |
| 179 | TTTCGGACGGTGTATACTGGT | 5158 | FRTVYTG | 6825 | 200 |
| 180 | AAAAAACGGCAGCCCATCGCC | 5159 | KKRQPIA | 6826 | 200 |
| 181 | AAAAATAAGCTCTACTATGGC | 5160 | KNKLYYG | 6827 | 200 |
| 182 | TCTACATCTCCGGTTAACAGC | 5161 | STSPVNS | 6828 | 200 |
| 183 | GGGTCTGGGATTGCGGGGACT | 5162 | GSGIAGT | 6829 | 200 |
| 184 | ATCGACGTACTGAACGGAAGT | 5163 | IDVLNGS | 6830 | 200 |
| 185 | GGTCATAATATGGCACAGGCG | 5164 | GHNMAQA | 6831 | 200 |
| 186 | ACGAGGAGCAACTCCGACGAA | 5165 | TRSNSDE | 6832 | 200 |
| 187 | GGAGCAAAAGGAACCATGGGC | 5166 | GAKGTMG | 6833 | 200 |
| 188 | GCTACTACTCTTACTGGTGAT | 5167 | ATTLTGD | 6834 | 200 |
| 189 | TTCAACACATCGTCGGAATTC | 5168 | FNTSSEF | 6835 | 200 |
| 190 | TATACGGCGCAGACCGGCTGG | 5169 | YTAQTGW | 6836 | 200 |
| 191 | CGAGTAAACAACGACGCAATA | 5170 | RVNNDAI | 6837 | 200 |
| 192 | ACTATTCAGCTTACTGATACT | 5171 | TIQLTDT | 6838 | 200 |
| 193 | GCCAGCATGCCCTCTGTAGAC | 5172 | ASMPSVD | 6839 | 200 |
| 194 | AATCAGGTGGGTGCGTCTGCG | 5173 | NQVGASA | 6840 | 200 |
| 195 | GGAAACATGGTGACTCCAAAC | 5174 | GNMVTPN | 6841 | 200 |
| 196 | CGTGGTGACCAAGGCACACAC | 5175 | RGDQGTH | 6842 | 200 |
| 197 | TCGAGTGATTCTCGTATTCCG | 5176 | SSDSRIP | 6843 | 200 |
| 198 | GGACTGCACGGCACCAACGCA | 5177 | GLHGTNA | 6844 | 200 |
| 199 | TCTAGTTATCAGTCTGGGCTG | 5178 | SSYQSGL | 6845 | 199.609 |
| 200 | ACAGCCTACTCGCCCACAGTC | 5179 | TAYSPTV | 6846 | 199.236 |
| 201 | CGCAGTGACACCACTAACGCC | 5180 | RSDTTNA | 6847 | 198.59 |
| 202 | CGTATTGTGGCTAATGAGCAG | 5181 | RIVANEQ | 6848 | 197.795 |
| 203 | ATCCACAACGAATCATACGTC | 5182 | IHNESYV | 6849 | 197.72 |
| 204 | CAGCAGAATACGCGTTTGCCG | 5183 | QQNTRLP | 6850 | 197.4665 |
| 205 | GGTATCAACTCCTCACACTTC | 5184 | GINSSHF | 6851 | 197.224 |
| 206 | GGTATGACTTCTAATCAGGTT | 5185 | GMTSNQV | 6852 | 196.916 |
| 207 | AGGGAGATTGTTCATAGTAAT | 5186 | REIVHSN | 6853 | 196.5775 |
| 208 | GCAGAACACACGTACACGGTC | 5187 | AEHTYTV | 6854 | 196.501 |
| 209 | CCTGCTACGCTACACCTGACA | 5188 | PATLHLT | 6855 | 196.1975 |
| 210 | AAGCAGACTGATAGTAGGGGT | 5189 | KQTDSRG | 6856 | 196.15 |
| 211 | ACTATGGTAGAAGTACTGCCA | 5190 | TMVEVLP | 6857 | 195.586 |
| 212 | ATCCCAACCGGCCAAACTAGC | 5191 | IPTGQTS | 6858 | 195.499 |
| 213 | ATGATAAAAACCAACATGTTG | 5192 | MIKTNML | 6859 | 195.198 |
| 214 | GCGGAACGACCCACTAGAGAC | 5193 | AERPTRD | 6860 | 194.842 |
| 215 | CGGGATCTGGGGCAGACCGGC | 5194 | RDLGQTG | 6861 | 194.34 |
| 216 | AATGAGGGGCGTGTGCAGACT | 5195 | NEGRVQT | 6862 | 194.00545 |
| 217 | ACTGCGGCTAGTACTGCGAGG | 5196 | TAASTAR | 6863 | 193.5855 |
| 218 | ACCCAAGGGAACAACATGGTA | 5197 | TQGNNMV | 6864 | 193.362 |
| 219 | CATAGTACTTTTCCTACGACT | 5198 | _{HSTF}ptt | 6865 | 193.274 |
| 220 | CAATCTATCGGCCACCCCGTT | 5199 | QSIGHPV | 6866 | 191.64595 |
| 221 | TCGGGTGTTAATAGTGAGCGT | 5200 | SGVNSER | 6867 | 191.3763 |
| 222 | CCTCACGCCAACGGAGTGACA | 5201 | PHANGVT | 6868 | 191.349 |
| 223 | GACCACCAACAAGCCCTAGCT | 5202 | DHQQALA | 6869 | 191.305 |
| 224 | AGTCAGCAGGGTTTTACTCTG | 5203 | SQQGFTL | 6870 | 191.2955 |
| 225 | ACAAACGCTGCTCTAGTACCA | 5204 | TNAALVP | 6871 | 191.1973 |
| 226 | GGTGTTAGTAGTAATTCTGCG | 5205 | GVSSNSA | 6872 | 190.1595 |
| 227 | CATGATACGGTTGGGGAGAGG | 5206 | HDTVGER | 6873 | 189.859 |
| 228 | GCGTTAAACGCCCAAGGGATC | 5207 | ALNAQGI | 6874 | 189.3825 |
| 229 | CATGATAGTATGTGTTGTGCG | 5208 | HDSMCCA | 6875 | 189.35 |
| 230 | TACATCGCGGCAGGGGAACAA | 5209 | YIAAGEQ | 6876 | 189.046 |
| 231 | GAGAATGCTCGTGAGGGTGTG | 5210 | ENAREGV | 6877 | 188.331 |
| 232 | GCTACGGTTTATAATGAGTTG | 5211 | ATVYNEL | 6878 | 188.18 |
| 233 | GACACTAACGGAATAAAATCA | 5212 | DTNGIKS | 6879 | 187.628 |
| 234 | AAGCCGACTGCGAATGATTGG | 5213 | KPTANDW | 6880 | 187.4884 |
| 235 | TATGAGAGTACTCATGTTAAT | 5214 | YESTHVN | 6881 | 187.1195 |
| 236 | TACACCAACGGGGGCCACCTA | 5215 | YTNGGHL | 6882 | 187.0304 |
| 237 | GTAGACAAATCTAGCCCAGTG | 5216 | VDKSSPV | 6883 | 186.9365 |
| 238 | CCAATCCAAAACGAATCGTCC | 5217 | PIQNESS | 6884 | 186.748 |
| 239 | ATACACAAATCTAGCGTCGAA | 5218 | IHKSSVE | 6885 | 186.654 |
| 240 | CATGATATTAGTCTGGATCGT | 5219 | HDISLDR | 6886 | 186.65 |
| 241 | TGGTGAGGGGCTGAGTTTGCC | 5220 | W*GAEFA | 6887 | 186.1 |
| 242 | TACTCTCAATCCATAAAAAAC | 5221 | YSQSIKN | 6888 | 186.0095 |
| 243 | GCCCAAGACAACAACCACGAC | 5222 | AQDNNHD | 6889 | 185.6231 |
| 244 | GGGCAGAAGGAGACTACTGCG | 5223 | GQKETTA | 6890 | 184.948 |
| 245 | AAAAGCGAAGTACCCGCCCGA | 5224 | KSEVPAR | 6891 | 184.116 |
| 246 | GAACTTAACACCGCACACGCA | 5225 | ELNTAHA | 6892 | 184.059 |
| 247 | AGCACAAACGCGGGACAAAGG | 5226 | STNAGQR | 6893 | 183.7145 |
| 248 | AAGGCGGTTTCGGAGATTATT | 5227 | KAVSEII | 6894 | 183.539 |
| 249 | ACCTTCACGGTCGACGGTAGA | 5228 | TFTVDGR | 6895 | 183.2535 |
| 250 | AGTACGAGTGGTTATAATACT | 5229 | STSGYNT | 6896 | 182.703 |
| 251 | AATCATAGTCTGTCGGAGCAT | 5230 | NHSLSEH | 6897 | 182.427 |
| 252 | TCTATGCAGGATCCTTCTTTG | 5231 | SMQDPSL | 6898 | 182.375 |
| 253 | GAACAACAAAAAACAGACAAC | 5232 | EQQKTDN | 6899 | 182.331 |
| 254 | GCTGTTGTGAATGAGAATATG | 5233 | AWNENM | 6900 | 182.3 |
| 255 | GGTCCCGGAGAAAACTACCGA | 5234 | GPGENYR | 6901 | 182.165 |
| 256 | TACAACGCAGGCGGAGAACAA | 5235 | YNAGGEQ | 6902 | 182.14 |
| 257 | GTCCTCTCCTCCAACCTGTAC | 5236 | VLSSNLY | 6903 | 181.3605 |
| 258 | GGTCTTTATCAGAATCCTACG | 5237 | GLYQNPT | 6904 | 181.2475 |
| 259 | AGTTCGGGGAGTTTGATTACT | 5238 | SSGSLIT | 6905 | 180.8125 |
| 260 | TATAATACGGATCGGACTAAT | 5239 | YNTDRTN | 6906 | 180.0485 |
| 261 | GAGAAGCCTCAGCATAATAGT | 5240 | EKPQHNS | 6907 | 179.9715 |
| 262 | GCGGCTTATGAGCATGCGCCT | 5241 | AAYEHAP | 6908 | 178.7065 |
| 263 | GGCGGCAACTACAACACAACT | 5242 | GGNYNTT | 6909 | 178.62 |
| 264 | TATCTGAATAGTACGCAGATT | 5243 | YLNSTQI | 6910 | 178.4905 |
| 265 | TCTAATTCTAATACTGCTGCT | 5244 | SNSNTAA | 6911 | 178.119 |
| 266 | TCGGATAATAGGAATACTGCG | 5245 | SDNRNTA | 6912 | 178.09355 |
| 267 | CGCTCGTTGGACAGCGGGATG | 5246 | RSLDSGM | 6913 | 177.6395 |
| 268 | GTTATGGATACGCATGGGATG | 5247 | VMDTHGM | 6914 | 177.54 |
| 269 | CATGTTACGGCGGTGGTTGAT | 5248 | HVTAVVD | 6915 | 177.447 |
| 270 | AGTATCACCCACAGCAACACC | 5249 | SITHSNT | 6916 | 177.4093 |
| 271 | GGATACGGCAGTTACAGCAAC | 5250 | GYGSYSN | 6917 | 177.0995 |
| 272 | CGTTGGTCTGAAAACAACTCC | 5251 | RWSENNS | 6918 | 176.788 |
| 273 | ATGTCTAGCCACACCGTCCAA | 5252 | MSSHTVQ | 6919 | 176.741 |
| 274 | TATGTTAGGGCGCAGGATCAG | 5253 | YVRAQDQ | 6920 | 176.713 |
| 275 | TTTGAGGGTGATAAGACTTAT | 5254 | FEGDKTY | 6921 | 176.655 |
| 276 | GTTAGCTCCGGCCACACGAAA | 5255 | VSSGHTK | 6922 | 176.4715 |
| 277 | TCGATGAACCTGCCAACTTCA | 5256 | SMNLPTS | 6923 | 176.425 |
| 278 | CTGAATCCTCAGCATGAGTTG | 5257 | LNPQHEL | 6924 | 176.19 |
| 279 | CTTCCGCCTGCGTCGGCGGGT | 5258 | LPPASAG | 6925 | 176.057 |
| 280 | GGAGGGAACTCCCACGGGGTA | 5259 | GGNSHGV | 6926 | 175.7625 |
| 281 | GGGGGTACGGGGTTGTCGAAG | 5260 | GGTGLSK | 6927 | 175.714 |
| 282 | AGTTTGAATTCTTCGAGTACT | 5261 | SLNSSST | 6928 | 175.4585 |
| 283 | ATGCCTAGTGAACCACCAGGG | 5262 | MPSEPPG | 6929 | 175.45 |
| 284 | GTTGTGCATTCGAGTATTACT | 5263 | WHSSIT | 6930 | 175.18685 |
| 285 | TTGAGTCTGGCTGGGAATAGG | 5264 | LSLAGNR | 6931 | 175.0985 |
| 286 | GCGGACATGCAACACACCGTA | 5265 | ADMQHTV | 6932 | 175.003 |
| 287 | TTTCGTGATGGTCAGGGTATG | 5266 | FRDGQGM | 6933 | 174.983 |
| 288 | ACCGGAACAGCGATCTCCCGA | 5267 | TGTAISR | 6934 | 174.5465 |
| 289 | ATGGGGAAGCATGAGGGTCTT | 5268 | MGKHEGL | 6935 | 174.3418 |
| 290 | CCGGAATCCGCCGCCAAAAGC | 5269 | PESAAKS | 6936 | 174.268 |
| 291 | ACCCAAGCCTTCTCCCTAGGC | 5270 | TQAFSLG | 6937 | 174.2365 |
| 292 | ACTGATGGTATTTTTCAGCCT | 5271 | TDGIFQP | 6938 | 174.014 |
| 293 | GGGAGCCCAGTGATAGTAAAC | 5272 | GSPVIVN | 6939 | 173.652 |
| 294 | GGGCGTGATAATCATCATGCG | 5273 | GRDNHHA | 6940 | 173.4132 |
| 295 | CCGCGTTCTATTACGGAGTTG | 5274 | PRSITEL | 6941 | 173.403 |
| 296 | TGGGTAAACAGTGTGGGCAAC | 5275 | WVNSVGN | 6942 | 173.244 |
| 297 | GTTCATGGGACGTTGACTTAT | 5276 | VHGTLTY | 6943 | 173.1685 |
| 298 | GGTGTGTATATTGATGGTCGG | 5277 | GVYIDGR | 6944 | 173.081 |
| 299 | ATGAGTAATGATTTGCCTGGG | 5278 | MSNDLPG | 6945 | 172.671 |
| 300 | AATCGGTCGGATAGTTTTGCG | 5279 | NRSDSFA | 6946 | 172.6595 |
| 301 | GGGCAAACAAACGCAGTACAC | 5280 | GQTNAVH | 6947 | 172.4582 |
| 302 | TACGTCGACAAATCAATGACA | 5281 | YVDKSMT | 6948 | 172.1735 |
| 303 | AGTGTGATGGTGGGTACGAAT | 5282 | SVMVGTN | 6949 | 171.86 |
| 304 | ATTGGTCTGCAGAATTCTACT | 5283 | IGLQNST | 6950 | 171.84715 |
| 305 | AACGACCGACCGCTTGCCAGC | 5284 | NDRPLAS | 6951 | 171.464 |
| 306 | CTCATGGGCAGTCCAGGCGCG | 5285 | LMGSPGA | 6952 | 171.27 |
| 307 | ATTGATCGTAGTGCTAGTTTG | 5286 | IDRSASL | 6953 | 171.009 |
| 308 | ATTCAGGCGAAGAATTCTGAG | 5287 | IQAKNSE | 6954 | 170.983 |
| 309 | CATCAGTCTTTTGATGCTGGT | 5288 | HQSFDAG | 6955 | 170.699 |
| 310 | GCGGTTAATGAGACTAGGCTT | 5289 | AVNETRL | 6956 | 170.564 |
| 311 | ATCGCGTCAACGTGGAACATG | 5290 | IASTWNM | 6957 | 170.52 |
| 312 | AAAGTGGACATGACCTCCAAA | 5291 | KVDMTSK | 6958 | 170.4035 |
| 313 | TCTCATAGTATTACGGGTCTT | 5292 | SHSITGL | 6959 | 170.333 |
| 314 | ACTATTACTAGTCCGTCGGTG | 5293 | TITSPSV | 6960 | 170.18 |
| 315 | GAACACATCTCTAGCTACGGA | 5294 | EHISSYG | 6961 | 169.832 |
| 316 | TTCTCAACAAACTCTGTAATC | 5295 | FSTNSVI | 6962 | 169.7245 |
| 317 | TCGATGGAGGGTCAGCAGCAT | 5296 | SMEGQQH | 6963 | 169.71 |
| 318 | GTCGACAAAAGCGAAGCCGTC | 5297 | VDKSEAV | 6964 | 169.6265 |
| 319 | CAAGCTAACTTATCAATAATC | 5298 | QANLSII | 6965 | 169.3842 |
| 320 | GTTAAGGCGAGTGCTGGGGTT | 5299 | VKASAGV | 6966 | 169.1112 |
| 321 | TTTGGTACTTCTTATACGACT | 5300 | FGTSYTT | 6967 | 168.915 |
| 322 | GGGCTCACAGGATACCCAATG | 5301 | GLTGYPM | 6968 | 168.8625 |
| 323 | GCTATGGGAGCACTCGTGCAC | 5302 | AMGALVH | 6969 | 168.807 |
| 324 | GTATACGCCACCGCACTCGCA | 5303 | VYATALA | 6970 | 168.7005 |
| 325 | ACATTAACAGACGTTCACCGA | 5304 | TLTDVHR | 6971 | 168.7 |
| 326 | CCATCCTCAGCGGGTAGCACA | 5305 | PSSAGST | 6972 | 168.601 |
| 327 | AAAAAACGAAAACACTAACTA | 5306 | KKRKH*L | 6973 | 168.58 |
| 328 | GCTTATCAGCTGACTCCGGCT | 5307 | AYQLTPA | 6974 | 168.579 |
| 329 | CTTGCGCCTGATAATATTGGG | 5308 | LAPDNIG | 6975 | 168.515 |
| 330 | ACAATCGTTTCCGCTTACGCC | 5309 | TIVSAYA | 6976 | 168.3875 |
| 331 | GGTAATAATTTGAGTTTGTCT | 5310 | GNNLSLS | 6977 | 168.1503 |
| 332 | AGCACAAACACCGAACCTAGG | 5311 | STNTEPR | 6978 | 168.122 |
| 333 | TCTTTTCAGACGGATCGTGCG | 5312 | SFQTDRA | 6979 | 167.793 |
| 334 | TTCTTAGAAGGAGTCGCTCAA | 5313 | FLEGVAQ | 6980 | 167.647 |
| 335 | CAAGACGTAGGACGCACGAAC | 5314 | QDVGRTN | 6981 | 167.4595 |
| 336 | ACGCATGGTGATCATATTCAG | 5315 | THGDHIQ | 6982 | 167.197 |
| 337 | GTATCAGAAGGACAACGAATC | 5316 | VSEGQRI | 6983 | 167.049 |
| 338 | AACATGGGTCCAATGGGCCGG | 5317 | NMGPMGR | 6984 | 166.961 |
| 339 | CTACCCTCAACAGAAACTTTG | 5318 | LPSTETL | 6985 | 166.942 |
| 340 | GGTGGTATGTCGGCGCATTCG | 5319 | GGMSAHS | 6986 | 166.775 |
| 341 | GGGATGATCGGGCACAACGCA | 5320 | GMIGHNA | 6987 | 166.716 |
| 342 | ATAGACGAACGTTCCTCGATA | 5321 | IDERSSI | 6988 | 166.601 |
| 343 | CATGTGAATCCTACGCCGGCG | 5322 | HVNPTPA | 6989 | 166.586 |
| 344 | TGGTCGAGAACTGGAAACACC | 5323 | WSRTGNT | 6990 | 166.483 |
| 345 | ATCAAAGACTCGTACCTTACT | 5324 | IKDSYLT | 6991 | 166.205 |
| 346 | TTGAACCAAAACAGTGTCTCC | 5325 | LNQNSVS | 6992 | 166.174 |
| 347 | TCTGGTCCGATTCCTGCTGTT | 5326 | SGPIPAV | 6993 | 166.146 |
| 348 | ATGCAAGGGCTTAACAACATG | 5327 | MQGLNNM | 6994 | 165.268 |
| 349 | TCAAACAGCGGAGGCAACCAC | 5328 | SNSGGNH | 6995 | 165.1895 |
| 350 | ACGAGTACGATGACTGCGCGT | 5329 | TSTMTAR | 6996 | 165.115 |
| 351 | GAGAATAGTGATTTGTCTTAT | 5330 | ENSDLSY | 6997 | 165.08 |
| 352 | CATCCTGGGAATAGTTCTGTG | 5331 | HPGNSSV | 6998 | 165.062 |
| 353 | TTAACACCCCAAGGGACTAGT | 5332 | LTPQGTS | 6999 | 165.0315 |
| 354 | ACCGACACCCGAAAAAACGAC | 5333 | TDTRKND | 7000 | 164.843 |
| 355 | GGGGAGACGCTGAGGTCTCAG | 5334 | GETLRSQ | 7001 | 164.72165 |
| 356 | AGCGGTGTATCAGAAGGAAAC | 5335 | SGVSEGN | 7002 | 164.715 |
| 357 | ACTCAGTATGGTACTCTGCCG | 5336 | TQYGTLP | 7003 | 164.526 |
| 358 | GGGACGGTTAACTCAAGTGCA | 5337 | GTVNSSA | 7004 | 164.3765 |
| 359 | GGTAAAGCAACCTTAGTCCTC | 5338 | GKATLVL | 7005 | 164.3755 |
| 360 | GGTATATACCCGGCATCCACC | 5339 | GIYPAST | 7006 | 164.34 |
| 361 | GGTGTTATGTCTAATGCTACT | 5340 | GVMSNAT | 7007 | 164.06 |
| 362 | ACTCATGTGATTGGGGCTGTG | 5341 | THVIGAV | 7008 | 163.918 |
| 363 | ACTCGGAGTGATATTGGTGTG | 5342 | TRSDIGV | 7009 | 163.7255 |
| 364 | ACGCTTACATTATCTACCCTC | 5343 | TLTLSTL | 7010 | 163.5555 |
| 365 | TATAATGAGTCTTCGAATGCG | 5344 | YNESSNA | 7011 | 163.314 |
| 366 | TCGACGCAGGCGCAGACCGGC | 5345 | STQAQTG | 7012 | 163.15 |
| 367 | CGCGACATGATCAACTCATCA | 5346 | RDMINSS | 7013 | 162.984 |
| 368 | ACTAAGGGTAATAATCTGGTT | 5347 | TKGNNLV | 7014 | 162.899 |
| 369 | GGTTCTACGGTGTCGGCGCAG | 5348 | GSTVSAQ | 7015 | 162.631 |
| 370 | AGGGGTGATACTATGAATTAT | 5349 | RGDTMNY | 7016 | 162.425 |
| 371 | CATGCGGATGTGAATGCTGGG | 5350 | HADVNAG | 7017 | 161.99 |
| 372 | AGCGTTGTCAACACCAACATC | 5351 | SVVNTNI | 7018 | 161.9445 |
| 373 | TCTAATGTTCATGTTGTTAAT | 5352 | SNVHVVN | 7019 | 161.753 |
| 374 | TCGGTTGATAAGCCGCCGGGG | 5353 | SVDKPPG | 7020 | 161.487 |
| 375 | GACCGCACCTACTCAAACACA | 5354 | DRTYSNT | 7021 | 161.475 |
| 376 | TACTCCGGAGAACTAAACAAA | 5355 | YSGELNK | 7022 | 161.125 |
| 377 | TATGATAAGACTTTGAGTGTT | 5356 | YDKTLSV | 7023 | 160.90695 |
| 378 | CACACCGCCACCCTTAGCAGC | 5357 | HTATLSS | 7024 | 160.8605 |
| 379 | GCTCTGGAGAGGGCTCAGTAT | 5358 | ALERAQY | 7025 | 160.837 |
| 380 | GGTACGAGTGATAATTATAGG | 5359 | GTSDNYR | 7026 | 160.175 |
| 381 | CATGTGAATAGTAGGGATCTT | 5360 | HVNSRDL | 7027 | 160.127 |
| 382 | TCGTCAGACGTTACCAGACAA | 5361 | SSDVTRQ | 7028 | 160.07 |
| 383 | GCTCATCATATGACGACGGAG | 5362 | AHHMTTE | 7029 | 160.019 |
| 384 | GAGGTGTCTAGGGATGGTCTG | 5363 | EVSRDGL | 7030 | 159.7445 |
| 385 | GTGGGCCGTGACGCAGAAGCT | 5364 | VGRDAEA | 7031 | 159.58 |
| 386 | GCACACCAAAAAGACCTACGC | 5365 | AHQKDLR | 7032 | 159.3139 |
| 387 | AGTGTTCTGAGTAGTTCGACT | 5366 | SVLSSST | 7033 | 159.208 |
| 388 | CTGGGTACGCTGCTTAGTCAG | 5367 | LGTLLSQ | 7034 | 159.04 |
| 389 | TCACAAAAACCAATCGACGAC | 5368 | SQKPIDD | 7035 | 158.663 |
| 390 | GATAATGTGCATGGGCAGGTG | 5369 | DNVHGQV | 7036 | 158.321 |
| 391 | GGTTCGCACAACGGGCCGACA | 5370 | GSHNGPT | 7037 | 157.748 |
| 392 | ATCTCCGGTAGTAGCAGTCTA | 5371 | ISGSSSL | 7038 | 157.64 |
| 393 | GGTTTTCATATTAATGGTGAG | 5372 | GFHINGE | 7039 | 157.326 |
| 394 | ATGAGTGATGGGCATTCGAAG | 5373 | MSDGHSK | 7040 | 157.296 |
| 395 | ACTGTTGGTGGTAATCATCAT | 5374 | TVGGNHH | 7041 | 156.895 |
| 396 | AATGCTACTCCGCCGAATCAT | 5375 | NATPPNH | 7042 | 156.8609 |
| 397 | ACGGGTATGAATAGTAATAAG | 5376 | TGMNSNK | 7043 | 156.85 |
| 398 | ATCGAAGCCTACTCACGAGAC | 5377 | IEAYSRD | 7044 | 156.774 |
| 399 | CGCGACCGTCAAGACTCGGTA | 5378 | RDRQDSV | 7045 | 156.7165 |
| 400 | CACACGGTTCAAATACGCGAA | 5379 | HTVQIRE | 7046 | 156.6241 |
| 401 | ACTTTGACGCAGACTGGGATG | 5380 | TLTQTGM | 7047 | 156.5735 |
| 402 | ATTAATAATTTTAATACTCTG | 5381 | INNFNTL | 7048 | 156.48 |
| 403 | GTAGCCGCGGGACCAGAAGCG | 5382 | VAAGPEA | 7049 | 156.315 |
| 404 | GATGGTAAGAATAGTTATGCG | 5383 | DGKNSYA | 7050 | 156.294 |
| 405 | TCCAGGCAAGAAAACTTCTCC | 5384 | SRQENFS | 7051 | 156.182 |
| 406 | TCTAACAGCAGTGTTGCGGTA | 5385 | SNSSVAV | 7052 | 156.048 |
| 407 | GATCATAGTAAGCAGAGTTCG | 5386 | DHSKQSS | 7053 | 155.89425 |
| 408 | TTGAGTGGTGCTGGTAGTCAG | 5387 | LSGAGSQ | 7054 | 154.9295 |
| 409 | GGTTGGAGTAATAATGAGTTG | 5388 | GWSNNEL | 7055 | 154.4735 |
| 410 | CTAATACGAGGTTCCATGGAA | 5389 | LIRGSME | 7056 | 154.426 |
| 411 | AATACTTATACTGCTGGTAAG | 5390 | NTYTAGK | 7057 | 154.346 |
| 412 | ACTCGTGGCGACATGGAATTC | 5391 | TRGDMEF | 7058 | 154.246 |
| 413 | CTCATGTCAGGGAAAGAAAAC | 5392 | LMSGKEN | 7059 | 154.155 |
| 414 | AAGGATACTAATCAGCAGATT | 5393 | KDTNQQI | 7060 | 153.7595 |
| 415 | CACAACGTCGGCCTAGGACAC | 5394 | HNVGLGH | 7061 | 153.7 |
| 416 | CCTGATCAGCCTGGTCCTTCT | 5395 | PDQPGPS | 7062 | 153.51 |
| 417 | ATGCAAAGAGAAGCAGCCAAC | 5396 | MQREAAN | 7063 | 153.45 |
| 418 | GGGCAGCGTACGACGAATGAT | 5397 | GQRTTND | 7064 | 153.425 |
| 419 | AAACACACAGAAAACGGGACC | 5398 | KHTENGT | 7065 | 153.394 |
| 420 | TTAGACGTGACGAGAATGAGA | 5399 | LDVTRMR | 7066 | 153.086 |
| 421 | ACGTTGGATCGGAATCAGACT | 5400 | TLDRNQT | 7067 | 152.9552 |
| 422 | ATCAACGCCGGCAACTACCGA | 5401 | INAGNYR | 7068 | 152.8475 |
| 423 | GCCGTAGACCAATCACGTTTG | 5402 | AVDQSRL | 7069 | 152.8359 |
| 424 | GCTCTTGGGCATCAGGGGAAT | 5403 | ALGHQGN | 7070 | 152.467 |
| 425 | CTTCCGCGTCATGATCAGTAT | 5404 | LPRHDQY | 7071 | 152.412 |
| 426 | ATTTCTGGGTCGTCGTCTCTT | 5405 | ISGSSSL | 7072 | 152.2375 |
| 427 | TGGAATACGAATATGGCGATT | 5406 | WNTNMAI | 7073 | 151.8755 |
| 428 | ATGTCGGATCGTACTTCTGAT | 5407 | MSDRTSD | 7074 | 151.677 |
| 429 | ACAAGGGAATCAATGTCCATC | 5408 | TRESMSI | 7075 | 151.6105 |
| 430 | CAGCGGGGGGAGCTTCCTGCG | 5409 | QRGELPA | 7076 | 151.533 |
| 431 | TCGTCTGATCCTAAGGGGCAG | 5410 | SSDPKGQ | 7077 | 151.4265 |
| 432 | CCGAGTGATAGGACTACTTAT | 5411 | PSDRTTY | 7078 | 151.3695 |
| 433 | TCTTCTTCTGATAGTCCGCGT | 5412 | SSSDSPR | 7079 | 151.2845 |
| 434 | GTATTACACTCTGTATCAGCA | 5413 | VLHSVSA | 7080 | 151.217 |
| 435 | AGTATGCAATCATACACCATG | 5414 | SMQSYTM | 7081 | 151.1285 |
| 436 | TCTCTGCAACTCACAGCGGGT | 5415 | SLQLTAG | 7082 | 151.106 |
| 437 | AACAACGTAAACCCGTACTCG | 5416 | NNVNPYS | 7083 | 151.0935 |
| 438 | CTTGCGAATGGTATGACGGCT | 5417 | LANGMTA | 7084 | 150.9825 |
| 439 | GGAATCACAGGATCAACAGGA | 5418 | GITGSTG | 7085 | 150.979 |
| 440 | ATGCTTGTTCAGAATACTCCT | 5419 | MLVQNTP | 7086 | 150.943 |
| 441 | GATGCGAATGCGGGTACGAGG | 5420 | DANAGTR | 7087 | 150.871 |
| 442 | GAAACCGGAGCTATGACCTCT | 5421 | ETGAMTS | 7088 | 150.803 |
| 443 | ATACAAACTACTACAAAATGC | 5422 | IQTTTKC | 7089 | 150.692 |
| 444 | GCGCAGCAGAGTCTTCATGGT | 5423 | AQQSLHG | 7090 | 150.673 |
| 445 | ATTGATAGTACTTGGAATACG | 5424 | IDSTWNT | 7091 | 150.518 |
| 446 | ACCGAATCGCAAACCATGAGG | 5425 | TESQTMR | 7092 | 150.4394 |
| 447 | TTGATCCAAACGCAAGGCACG | 5426 | LIQTQGT | 7093 | 150.329 |
| 448 | ATAGTAAACATAACTCAATCG | 5427 | IVNITQS | 7094 | 150.305 |
| 449 | GTGGCGGTGTCTAATACGCCT | 5428 | VAVSNTP | 7095 | 150.03285 |
| 450 | GGTCATAGGGATTCGGGTGGT | 5429 | GHRDSGG | 7096 | 149.991 |
| 451 | CGGAATGAGAATCTTAATAAT | 5430 | RNENLNN | 7097 | 149.913 |
| 452 | GTCATGCAACGATCTGCACAA | 5431 | VMQRSAQ | 7098 | 149.77 |
| 453 | GTCTCGGGTCCGGTATCGGTC | 5432 | VSGPVSV | 7099 | 149.7645 |
| 454 | GGGGATATTCAGAGTCATAGT | 5433 | GDIQSHS | 7100 | 149.392 |
| 455 | GTTGAGAAGCCTCTGGAGACT | 5434 | VEKPLET | 7101 | 149.24 |
| 456 | GGTGTTCAGATGACTGCGGGG | 5435 | GVQMTAG | 7102 | 149.14805 |
| 457 | ACCACAAAAACGACATCTATG | 5436 | TTKTTSM | 7103 | 149.0935 |
| 458 | CCTGGGAATCCGTCTAGTAAT | 5437 | PGNPSSN | 7104 | 148.9075 |
| 459 | GCTTCGCGGCCTGCGGCTCAG | 5438 | ASRPAAQ | 7105 | 148.8831 |
| 460 | GTTCATGATCAGGGGGCTGGG | 5439 | VHDQGAG | 7106 | 148.829 |
| 461 | TCAGGTTCGGAATACCGTACC | 5440 | SGSEYRT | 7107 | 148.812 |
| 462 | TACGTGGACGACAACAGTCGC | 5441 | YVDDNSR | 7108 | 148.744 |
| 463 | ATGGCCGGTGACCAAGAACTC | 5442 | MAGDQEL | 7109 | 148.7 |
| 464 | CCTTTGCACAACATACCTCCT | 5443 | PLHNIPP | 7110 | 148.609 |
| 465 | AGTGGGATTGGTACTTATTCT | 5444 | SGIGTYS | 7111 | 148.357 |
| 466 | TCGAACGCAGACATCCTCGCC | 5445 | SNADILA | 7112 | 148.08 |
| 467 | AGTCACAACCAAGTAAACGTA | 5446 | SHNQVNV | 7113 | 147.981 |
| 468 | CAGCATTCTCCGAAGCCGGTT | 5447 | QHSPKPV | 7114 | 147.97 |
| 469 | TCCGCAAACAACATAGCCCCC | 5448 | SANNIAP | 7115 | 147.813 |
| 470 | GAAGAAACACGGACCAGAATG | 5449 | EETRTRM | 7116 | 147.667 |
| 471 | CTGTCTAATTCGATTACGCCT | 5450 | LSNSITP | 7117 | 147.594 |
| 472 | AGTGCTTTGAATAGTGTGGAT | 5451 | SALNSVD | 7118 | 147.326 |
| 473 | ACTAATCTTGCTGTTACGCTG | 5452 | TNLAVTL | 7119 | 147.1589 |
| 474 | CAGTCGACGCTGAATAGGCCT | 5453 | QSTLNRP | 7120 | 147.0302 |
| 475 | ATAGAACACATGCTTAGACCC | 5454 | IEHMLRP | 7121 | 146.9635 |
| 476 | CCGACTCCTAATGAGCATATG | 5455 | PTPNEHM | 7122 | 146.84 |
| 477 | ATTAATGAGATTGGTAGGATG | 5456 | INEIGRM | 7123 | 146.786 |
| 478 | AACAACGACAACGTCTACGTG | 5457 | NNDNVYV | 7124 | 146.764 |
| 479 | ATAGTCCACACCCCGCAAGTG | 5458 | IVHTPQV | 7125 | 146.309 |
| 480 | CATAAGAGTGAGAGTCATAAT | 5459 | HKSESHN | 7126 | 146.142 |
| 481 | TCATCGTCAGACTCACCCAGA | 5460 | SSSDSPR | 7127 | 146.067 |
| 482 | TACTCTACAGAAGCACGAGTC | 5461 | YSTEARV | 7128 | 145.9845 |
| 483 | ACCTCGGGTGACCGGTACACG | 5462 | TSGDRYT | 7129 | 145.963 |
| 484 | GAGAAGAATCTGACTAATGCT | 5463 | EKNLTNA | 7130 | 145.88775 |
| 485 | ACAAGGGACCAAAGGTCTACA | 5464 | TRDQRST | 7131 | 145.8855 |
| 486 | GCGACTGATAAGATGACTCCT | 5465 | ATDKMTP | 7132 | 145.881 |
| 487 | AATAGTTATACTGCTGGGAAG | 5466 | NSYTAGK | 7133 | 145.87565 |
| 488 | ACGCTGGATACTAAGGATCTT | 5467 | TLDTKDL | 7134 | 145.82 |
| 489 | GCATCCAACGGGCAAGTTAAC | 5468 | ASNGQVN | 7135 | 145.7395 |
| 490 | ACCTCAATATCGTCGCAAAGC | 5469 | TSISSQS | 7136 | 145.707 |
| 491 | GATAATAGTCCTGCTAATCAT | 5470 | DNSPANH | 7137 | 145.5712 |
| 492 | AACTCCAGGGAAATGGGTGTA | 5471 | NSREMGV | 7138 | 145.562 |
| 493 | ACCAGCGCGTCTGAAAACTGG | 5472 | TSASENW | 7139 | 145.56 |
| 494 | ACTGTAGGATCCTCATACGCT | 5473 | TVGSSYA | 7140 | 145.0453 |
| 495 | CAACAATCACAAAACTCTATA | 5474 | QQSQNSI | 7141 | 144.9825 |
| 496 | CTTCGGGATGGGATTGCTTCT | 5475 | LRDGIAS | 7142 | 144.9725 |
| 497 | GTGCAAAAAACGACGGCTTGG | 5476 | VQKTTAW | 7143 | 144.78 |
| 498 | ATGAGTACGGTTCTTCGGGAG | 5477 | MSTVLRE | 7144 | 144.5125 |
| 499 | AGTATGGATGCTCGGTTGACG | 5478 | SMDARLT | 7145 | 144.404 |
| 500 | GGCGCCCGTACAATCTTAGAC | 5479 | GARTILD | 7146 | 144.3975 |
| 501 | CACGAAAGCCACTACGTGTCA | 5480 | HESHYVS | 7147 | 144.2755 |
| 502 | CTTGAGGGTCAGAATAAGACG | 5481 | LEGQNKT | 7148 | 144.137 |
| 503 | CGGGACTTGAGACCCGTGACG | 5482 | RDLRPVT | 7149 | 143.788 |
| 504 | CAGATTTTGAATTATAGTGTG | 5483 | QILNYSV | 7150 | 143.741 |
| 505 | ATAAGTGTAGGTGTGTCCGTA | 5484 | ISVGVSV | 7151 | 143.727 |
| 506 | AAGGCGGGTGAGTATAGGGAT | 5485 | KAGEYRD | 7152 | 143.693 |
| 507 | CTTACTACGAATGGTATGCTG | 5486 | LTTNGML | 7153 | 143.66 |
| 508 | ACTAGTAATTATATGCATGAG | 5487 | TSNYMHE | 7154 | 143.642 |
| 509 | ACCCACAACTCTACAGGCCTT | 5488 | THNSTGL | 7155 | 143.502 |
| 510 | AATAATGTTGTTAGGGATGAT | 5489 | NNVVRDD | 7156 | 143.142 |
| 511 | AGTGGGACGTATGCTAGTCGT | 5490 | SGTYASR | 7157 | 143.123 |
| 512 | CTGTCTCACGCCATGGACCGG | 5491 | LSHAMDR | 7158 | 142.937 |
| 513 | AATTGGAATTCTGAGGGTACG | 5492 | NWNSEGT | 7159 | 142.7425 |
| 514 | AGTCTGCGTCCAACCCTACCT | 5493 | SLRPTLP | 7160 | 142.4292 |
| 515 | TACCAAACGGGAGACAAAGAC | 5494 | YQTGDKD | 7161 | 142.104 |
| 516 | CGCAGCGACAAAGGAACGTTG | 5495 | RSDKGTL | 7162 | 142.1004 |
| 517 | TCTACCATCGGCAACAGCACG | 5496 | STIGNST | 7163 | 142.0895 |
| 518 | GAAAACAACATGCAACACGGC | 5497 | ENNMQHG | 7164 | 142.037 |
| 519 | AAGTATACGGAGTCGAATGCG | 5498 | KYTESNA | 7165 | 142.0295 |
| 520 | CCAACAAACAACTTAAGTATG | 5499 | PTNNLSM | 7166 | 141.91 |
| 521 | TGCAAAAACAACTCAGAATGC | 5500 | CKNNSEC | 7167 | 141.874 |
| 522 | ACGGTTAATGCGGATGGGTCG | 5501 | TVNADGS | 7168 | 141.672 |
| 523 | TTTTCTGGTCAGGCGTTGGCT | 5502 | FSGQALA | 7169 | 141.6645 |
| 524 | AATCATATTAGGAATCCTATG | 5503 | NHIRNPM | 7170 | 141.628 |
| 525 | ATGGTGAATTCGGAGAATACT | 5504 | MVNSENT | 7171 | 141.624 |
| 526 | ACTGATGGGCCGCGTCTGGCT | 5505 | TDGPRLA | 7172 | 141.5814 |
| 527 | TTCAACGGGTACGTCATGGCA | 5506 | FNGYVMA | 7173 | 141.042 |
| 528 | AATGCGAATGGGCCTGTGAGT | 5507 | NANGPVS | 7174 | 141.0385 |
| 529 | AGTACGAGTCAGGAGAATAGG | 5508 | STSQENR | 7175 | 140.9233 |
| 530 | CAAGGGACTCTCTTGTCTCCA | 5509 | QGTLLSP | 7176 | 140.773 |
| 531 | CTAATCACAGCCACCACTAAC | 5510 | LITATTN | 7177 | 140.4315 |
| 532 | TCTGGCGTCTCGAAAGAACGG | 5511 | SGVSKER | 7178 | 140.3655 |
| 533 | TCTACTTCAATAGGAGTGGTA | 5512 | STSIGW | 7179 | 140.351 |
| 534 | TCTCATGTGACTGTTACGGAT | 5513 | SHVTVTD | 7180 | 140.31 |
| 535 | TCTAATAATCTGAATCAGGAG | 5514 | SNNLNQE | 7181 | 140.282 |
| 536 | GCAAACCACGACAACATCGTG | 5515 | ANHDNIV | 7182 | 140.0405 |
| 537 | GACACGTCCTCCGGCAACAGG | 5516 | DTSSGNR | 7183 | 140.01 |
| 538 | GTGGTTCCTATGCCTACTACT | 5517 | VVPMPTT | 7184 | 139.945 |
| 539 | CTTACTAATAATTTTAAGGAT | 5518 | LTNNFKD | 7185 | 139.782 |
| 540 | TCTTCGCCTACTAAGGGTACT | 5519 | SSPTKGT | 7186 | 139.7594 |
| 541 | GATATTCCGTCTGATAATACG | 5520 | DIPSDNT | 7187 | 139.44 |
| 542 | TACACGGGATTCGAATTGAGA | 5521 | YTGFELR | 7188 | 139.43 |
| 543 | AACTCAGGTAACAACCCCATC | 5522 | NSGNNPI | 7189 | 139.4185 |
| 544 | ACGACCCGAAACGAACACTCG | 5523 | TTRNEHS | 7190 | 139.3175 |
| 545 | AATGTGGGTAATACTCTTGGG | 5524 | NVGNTLG | 7191 | 139.128 |
| 546 | TACCACACCCACCAAGTCGCA | 5525 | YHTHQVA | 7192 | 138.871 |
| 547 | GGTAGTGCGAGTAATAGTGGT | 5526 | GSASNSG | 7193 | 138.841 |
| 548 | GGGAAGAATCAGCCTACTCCG | 5527 | GKNQPTP | 7194 | 138.839 |
| 549 | TTCACCGCCACTTTAGGAACC | 5528 | FTATLGT | 7195 | 138.809 |
| 550 | ATGAACCAAATGGGCGGCCTG | 5529 | MNQMGGL | 7196 | 138.794 |
| 551 | AACGTGTCACTAACGCAAACG | 5530 | NVSLTQT | 7197 | 138.62365 |
| 552 | TCGTCTAGCAACACAAACGCT | 5531 | SSSNTNA | 7198 | 138.538 |
| 553 | ACTAATTCTAATCAGAGTTCG | 5532 | TNSNQSS | 7199 | 138.513 |
| 554 | ATAAGTCACGACCTTAAATAC | 5533 | ISHDLKY | 7200 | 138.4685 |
| 555 | GATTCGACGTATGTTTTGGCT | 5534 | DSTYVLA | 7201 | 138.402 |
| 556 | ATGAACACCGGCTCTTCGAGT | 5535 | MNTGSSS | 7202 | 138.35 |
| 557 | GCCGGAAACTACCAATCATCA | 5536 | AGNYQSS | 7203 | 138.2335 |
| 558 | ACGATTTATAATATGGGTCCG | 5537 | TIYNMGP | 7204 | 138.1385 |
| 559 | GTATCAACGACAACGGACCGG | 5538 | VSTTTDR | 7205 | 137.9925 |
| 560 | GGGGTGACTGTTAGGGAGCTT | 5539 | GVTVREL | 7206 | 137.96205 |
| 561 | GATATTACTAATCAGTCGTAT | 5540 | DITNQSY | 7207 | 137.802 |
| 562 | AATCAGTCGCTTACTATGGAT | 5541 | NQSLTMD | 7208 | 137.363 |
| 563 | ACGAATTATAATATTGGTCCG | 5542 | TNYNIGP | 7209 | 137.0645 |
| 564 | CGTGGTACGGAGGGGACGCCG | 5543 | RGTEGTP | 7210 | 137.0621 |
| 565 | CCCATAACACGGGAATCGGGA | 5544 | PITRESG | 7211 | 136.943 |
| 566 | ACCGGACAAGCGGGCGGATCG | 5545 | TGQAGGS | 7212 | 136.857 |
| 567 | ATGACTAAACACGACGCGACG | 5546 | MTKHDAT | 7213 | 136.624 |
| 568 | CCTATACCCCACGGTTCATCC | 5547 | PIPHGSS | 7214 | 136.299 |
| 569 | ACGACTGGGGGGACGGGGATG | 5548 | TTGGTGM | 7215 | 136.1295 |
| 570 | CTAACCGAATCTGTGAGAAAC | 5549 | LTESVRN | 7216 | 135.933 |
| 571 | AGTAGTAATCTGACTTTGTCT | 5550 | SSNLTLS | 7217 | 135.86 |
| 572 | TTGAATAATTCTGCGACTGTT | 5551 | LNNSATV | 7218 | 135.76 |
| 573 | GCATACGGATCGTCCGGAAGA | 5552 | AYGSSGR | 7219 | 135.5095 |
| 574 | GTTTCTTATGATAATGGGTCG | 5553 | VSYDNGS | 7220 | 135.48 |
| 575 | CCGAGTCAGAGTAGGTCGCTT | 5554 | PSQSRSL | 7221 | 135.38455 |
| 576 | GTCCTGGTTAACGTACACAAC | 5555 | VLVNVHN | 7222 | 135.346 |
| 577 | TTGATGACTGGTACTGCGTCG | 5556 | LMTGTAS | 7223 | 135.327 |
| 578 | GCTGCTGGTAATCCTACTCGT | 5557 | AAGNPTR | 7224 | 135.3067 |
| 579 | TCCGCGCAATCTTTCGTAGTT | 5558 | SAQSFW | 7225 | 134.721 |
| 580 | CAAGACCAAACGAGCAACCGT | 5559 | QDQTSNR | 7226 | 134.721 |
| 581 | CAGTCGATTGGGCATCCGGTG | 5560 | QSIGHPV | 7227 | 134.625 |
| 582 | GCTGGGGTGCGTGAGTCGTTT | 5561 | AGVRESF | 7228 | 134.586 |
| 583 | AATACTAATTATGCGATGCAT | 5562 | NTNYAMH | 7229 | 134.493 |
| 584 | GAGCGGAGTACGCATAATGTT | 5563 | ERSTHNV | 7230 | 134.479 |
| 585 | ATGTCCGGATCCATGATATCA | 5564 | MSGSMIS | 7231 | 134.414 |
| 586 | TCTGGCCAAGGATTCTCGGCA | 5565 | SGQGFSA | 7232 | 134.3465 |
| 587 | ACATTCACTACTCTGGGCAAA | 5566 | TFTTLGK | 7233 | 134.2015 |
| 588 | GACGCAAACGCTGGCACAAGA | 5567 | DANAGTR | 7234 | 134.063 |
| 589 | AGGGATACGGCTAAGGGGGTG | 5568 | RDTAKGV | 7235 | 133.882 |
| 590 | GTGCGGTCTGGTAATAAGCCG | 5569 | VRSGNKP | 7236 | 133.87 |
| 591 | CCCCAATGGGGAACTGACCCG | 5570 | PQWGTDP | 7237 | 133.743 |
| 592 | GCCTTCCAAAACACCGGCGCA | 5571 | AFQNTGA | 7238 | 133.743 |
| 593 | GCGACGACTCAGCTGATGACT | 5572 | ATTQLMT | 7239 | 133.675 |
| 594 | ACGAACGCGAGCGAAGGCTCA | 5573 | TNASEGS | 7240 | 133.642 |
| 595 | ATGCTCACAGAAACCAAAGCA | 5574 | MLTETKA | 7241 | 133.57 |
| 596 | ACGAATAATTTGCTGGCTCAG | 5575 | TNNLLAQ | 7242 | 133.517 |
| 597 | GATGTTTTGCTTAAGAATTTT | 5576 | DVLLKNF | 7243 | 133.49 |
| 598 | TATACGCCTGGGCTTACTGAG | 5577 | YTPGLTE | 7244 | 133.356 |
| 599 | CGGCATGCTTCGGATGCTAAT | 5578 | RHASDAN | 7245 | 133.22 |
| 600 | AGTAAGGGTGATCAGCTTAAT | 5579 | SKGDQLN | 7246 | 133.1865 |
| 601 | GTGCTGGTTACTCAGAATCAT | 5580 | VLVTQNH | 7247 | 133.0645 |
| 602 | CGACAAGGCGACTTAAAAGAA | 5581 | RQGDLKE | 7248 | 132.97895 |
| 603 | ATTCAGTCGCAGTCGCAGTTG | 5582 | IQSQSQL | 7249 | 132.832 |
| 604 | AAAATAGAAAGCGGAACCATA | 5583 | KIESGTI | 7250 | 132.825 |
| 605 | ACAACTCTTAGCCAACAAAGC | 5584 | TTLSQQS | 7251 | 132.567 |
| 606 | TTTCAGTTGGCTAGTAATCCG | 5585 | FQLASNP | 7252 | 132.4465 |
| 607 | TGGATTTCTACTGAGATGAGG | 5586 | WISTEMR | 7253 | 132.356 |
| 608 | GCCATAACAATCACTCAAAAA | 5587 | AITITQK | 7254 | 132.1895 |
| 609 | GTTACTGGTGTTGATTATGCG | 5588 | VTGVDYA | 7255 | 131.7275 |
| 610 | ATAATAGCATCCTCTACCACG | 5589 | IIASSTT | 7256 | 131.506 |
| 611 | ATTTATACGAATAGTCATGTT | 5590 | IYTNSHV | 7257 | 131.43 |
| 612 | AACGACATCCCCACACGAGCC | 5591 | NDIPTRA | 7258 | 131.424 |
| 613 | GGCGTAACCAACGCTTCCAAA | 5592 | GVTNASK | 7259 | 131.404 |
| 614 | AGGGGTAACACTCTCGAAATG | 5593 | RGNTLEM | 7260 | 131.381 |
| 615 | GGTATTAATCATGTGGCGTCT | 5594 | GINHVAS | 7261 | 131.36 |
| 616 | TTCAACGAAACTGCCGGGCGA | 5595 | FNETAGR | 7262 | 131.2915 |
| 617 | GCCTCGCAATCAGAAAAAAAC | 5596 | ASQSEKN | 7263 | 131.243 |
| 618 | GAACTTAACGAAAGGAACCTC | 5597 | ELNERNL | 7264 | 131.06 |
| 619 | GGAGAACAAAGCCACAACCAA | 5598 | GEQSHNQ | 7265 | 130.951 |
| 620 | TTGACTAATGATAATAAGTTG | 5599 | LTNDNKL | 7266 | 130.846 |
| 621 | TCTTATGGGCAGGGTCTGGAG | 5600 | SYGQGLE | 7267 | 130.8108 |
| 622 | CACAGTGACATGGGCTCAAGC | 5601 | HSDMGSS | 7268 | 130.758 |
| 623 | GCGTTAAAATCCGACAGCGCC | 5602 | ALKSDSA | 7269 | 130.684 |
| 624 | ACGAATCTTTCTCCTAAGACG | 5603 | TNLSPKT | 7270 | 130.64725 |
| 625 | GCTGATACGAATATTATTGTG | 5604 | ADTNUV | 7271 | 130.47 |
| 626 | AGTGAGGGTAGTTCGCGGTCG | 5605 | SEGSSRS | 7272 | 130.30865 |
| 627 | AACTCTAGTAACACTGGTTGG | 5606 | NSSNTGW | 7273 | 130.26 |
| 628 | GTAACGAACGAATCCCGCGCC | 5607 | VTNESRA | 7274 | 130.2145 |
| 629 | GGGCGGCACACATTAGCGGAC | 5608 | GRHTLAD | 7275 | 130.1035 |
| 630 | GCTGTTGTGAATGTTGCGCAG | 5609 | AVVNVAQ | 7276 | 130.094 |
| 631 | AAAAAACCACAACAGTGACTA | 5610 | KKPQQ*L | 7277 | 130.08 |
| 632 | GGCAACGCTTCCGGAAACCCA | 5611 | GNASGNP | 7278 | 129.97 |
| 633 | TTTGCGGCTGGGGCGCATGGT | 5612 | FAAGAHG | 7279 | 129.69 |
| 634 | GGAGGAAACCAAAACCTTACT | 5613 | GGNQNLT | 7280 | 129.6198 |
| 635 | CATACGCAGTCGACGGGTTAT | 5614 | HTQSTGY | 7281 | 129.541 |
| 636 | CTATTGGGAAACGCACCCACA | 5615 | LLGNAPT | 7282 | 129.534 |
| 637 | GAGAAGGGGAATAGTGGGGTT | 5616 | EKGNSGV | 7283 | 129.5155 |
| 638 | GGCACGGAACCGCGCACTGCA | 5617 | GTEPRTA | 7284 | 129.37 |
| 639 | ATGCATGCGCAGGAGTCTCGT | 5618 | MHAQESR | 7285 | 129.14615 |
| 640 | CTGATTTCGACTGGTAATAAT | 5619 | LISTGNN | 7286 | 129.021 |
| 641 | AAGAATAATAATTCTGATTCT | 5620 | KNNNSDS | 7287 | 128.767 |
| 642 | GGGACATTAGCCTCAATGTCC | 5621 | GTLASMS | 7288 | 128.734 |
| 643 | AGGATTGATACGTTGTTGGTG | 5622 | RIDTLLV | 7289 | 128.385 |
| 644 | ATTTCGGGGTCTCATTTGAAT | 5623 | ISGSHLN | 7290 | 128.3305 |
| 645 | ACGGTTGAGGGTTCTTATCCG | 5624 | TVEGSYP | 7291 | 128.288 |
| 646 | ACGGAGTATCTGGCTGGTCTG | 5625 | TEYLAGL | 7292 | 128.224 |
| 647 | TATCTGGAGGGTGCTCATCGT | 5626 | YLEGAHR | 7293 | 128.166 |
| 648 | TTATCCGCAACATCTACGATG | 5627 | LSATSTM | 7294 | 128.1455 |
| 649 | ATGCTTAGTCAGGTTCTGACG | 5628 | MLSQVLT | 7295 | 128.142 |
| 650 | GCCAGGAACGTAATGCTGGGG | 5629 | ARNVMLG | 7296 | 128.128 |
| 651 | CTTCATGGGAATTTTAGTCAG | 5630 | LHGNFSQ | 7297 | 128.112 |
| 652 | GGCCACGGAAGTGACTTGACC | 5631 | GHGSDLT | 7298 | 128.0576 |
| 653 | GGTGTGAATTATCATACTACG | 5632 | GVNYHTT | 7299 | 127.702 |
| 654 | TATCTGCAGACGGGTACTCTG | 5633 | YLQTGTL | 7300 | 127.624 |
| 655 | GTAAACGGGGGAAAACCAGTC | 5634 | VNGGKPV | 7301 | 127.5325 |
| 656 | GAAGTAGGTAAAACCACCCAC | 5635 | EVGKTTH | 7302 | 127.5065 |
| 657 | CGACCCCCGAACGAAAACAGA | 5636 | RPPNENR | 7303 | 127.49235 |
| 658 | GTGGATAAGAATCATCCTTTG | 5637 | VDKNHPL | 7304 | 127.431 |
| 659 | AGTAAGTCGACTGAGATTATG | 5638 | SKSTEIM | 7305 | 127.281 |
| 660 | ACCGCTCTTCTATCTAACTTA | 5639 | TALLSNL | 7306 | 127.228 |
| 661 | ATGCACACAAGTAGACCCCCA | 5640 | MHTSRPP | 7307 | 126.861 |
| 662 | ACTCCAACTAACGGGAACCCT | 5641 | TPTNGNP | 7308 | 126.785 |
| 663 | ACGACGTCTGTGGAGAAGACT | 5642 | TTSVEKT | 7309 | 126.7725 |
| 664 | CAATACGACGCCAGCCGACAA | 5643 | QYDASRQ | 7310 | 126.66 |
| 665 | TACAACGCCCACGAATCATTC | 5644 | YNAHESF | 7311 | 126.521 |
| 666 | GACAACCAACAAGCCCTAGCT | 5645 | DNQQALA | 7312 | 126.49 |
| 667 | ACGAAGAGTTTTAATGATCTT | 5646 | TKSFNDL | 7313 | 126.488 |
| 668 | TTAGCCGACTCAAACAGCAAA | 5647 | LADSNSK | 7314 | 126.48 |
| 669 | CCGAGTACTCATGGGTATGTT | 5648 | PSTHGYV | 7315 | 126.4775 |
| 670 | CAGGTTCAGGGGACTCTGGGG | 5649 | QVQGTLG | 7316 | 126.4394 |
| 671 | CTGACTGCTGTTGCGATTAGT | 5650 | LTAVAIS | 7317 | 126.235 |
| 672 | AGGTATGAGAGTACTAGTGCT | 5651 | RYESTSA | 7318 | 126.21 |
| 673 | GCGGATCATAATCATATTGCT | 5652 | ADHNHIA | 7319 | 126.21 |
| 674 | TGGAATGCTGAGAATAGTAAG | 5653 | WNAENSK | 7320 | 126.112 |
| 675 | AACTCTGTCGTAGGGAACATC | 5654 | NSWGNI | 7321 | 126.111 |
| 676 | TTCGGAGCAACCACCACAGCA | 5655 | FGATTTA | 7322 | 126.048 |
| 677 | GCTTCAGGGTCTGAAATGCCT | 5656 | ASGSEMP | 7323 | 125.971 |
| 678 | GACGGAACAAAAAGCGGAATG | 5657 | DGTKSGM | 7324 | 125.871 |
| 679 | TACACCGCCGACAAAAAACAA | 5658 | YTADKKQ | 7325 | 125.562 |
| 680 | CCGATTGCTGAGAGGCCTTCT | 5659 | PIAERPS | 7326 | 125.558 |
| 681 | AGCAACTCGTACTTACTCAAC | 5660 | SNSYLLN | 7327 | 125.52 |
| 682 | ACGAGAGAATTGACAAAAAAC | 5661 | TRELTKN | 7328 | 125.47 |
| 683 | CTCGGAAACCACTACACACCC | 5662 | LGNHYTP | 7329 | 125.444 |
| 684 | TTGCTCCAATCCATAGTGGTA | 5663 | LLQSIW | 7330 | 125.441 |
| 685 | ATGATGGCGAATAATATGCAG | 5664 | MMANNMQ | 7331 | 125.38 |
| 686 | GGCGCGGACACCTCGACCCGG | 5665 | GADTSTR | 7332 | 125.369 |
| 687 | GGGTTCGGGCACGTGCCCGAA | 5666 | GFGHVPE | 7333 | 125.324 |
| 688 | AACGTTATGCACTCTTCCTCC | 5667 | NVMHSSS | 7334 | 125.313 |
| 689 | TCTGCGTCGAAAGTGGAATAC | 5668 | SASKVEY | 7335 | 125.2945 |
| 690 | ATTTCGAGTTATGATGGTAAT | 5669 | ISSYDGN | 7336 | 125.273 |
| 691 | AAAAAAACGAAAACACTAACT | 5670 | KKTKTLT | 7337 | 125.26 |
| 692 | GGTACCATATTACCAAACCAA | 5671 | GTILPNQ | 7338 | 125.236 |
| 693 | TTAAACGTCGTACCAACACAA | 5672 | LNVVPTQ | 7339 | 125.09 |
| 694 | AGTAGTGTTACTTCGAGGGAG | 5673 | SSVTSRE | 7340 | 124.987 |
| 695 | CCCATCAACGTACTCACGACA | 5674 | PINVLTT | 7341 | 124.911 |
| 696 | GGGGATAAGGCGAGTTTGGCG | 5675 | GDKASLA | 7342 | 124.8255 |
| 697 | AGGATGTCGGAGAGTTCTGAT | 5676 | RMSESSD | 7343 | 124.5625 |
| 698 | AATCTTTTGACTTCGTCGCCT | 5677 | NLLTSSP | 7344 | 124.54 |
| 699 | TCGCGGCTATCACAAGACCCC | 5678 | SRLSQDP | 7345 | 124.3495 |
| 700 | TGGTCGAATGCTCAGAGTCCG | 5679 | WSNAQSP | 7346 | 124.231 |
| 701 | GGCAGACACCTTCAATCGGAC | 5680 | GRHLQSD | 7347 | 124.19 |
| 702 | ATGAGTCTCGCCTCCACCCAA | 5681 | MSLASTQ | 7348 | 124.092 |
| 703 | ATGAGTACGGTTCTTCGCGAG | 5682 | MSTVLRE | 7349 | 124.05 |
| 704 | TCTAAATCTGAAAACCTGCAA | 5683 | SKSENLQ | 7350 | 124.043 |
| 705 | TGGACGGAAGGGGGCTCAGGA | 5684 | WTEGGSG | 7351 | 124 |
| 706 | TCGACTACGGTTTGGACTGCT | 5685 | STTVWTA | 7352 | 123.99 |
| 707 | GTTAGTTTGGAGAGTCGGTTG | 5686 | VSLESRL | 7353 | 123.799 |
| 708 | TCTATGTATGGGCAGGCTGGG | 5687 | SMYGQAG | 7354 | 123.777 |
| 709 | ACTAATACGCAGAATAATCCG | 5688 | TNTQNNP | 7355 | 123.702 |
| 710 | GTCGGTGACAGGAACTTGGTC | 5689 | VGDRNLV | 7356 | 123.663 |
| 711 | CTCGCCCACAACTACTTAAGC | 5690 | LAHNYLS | 7357 | 123.6175 |
| 712 | TGGACAGCTAACCAAGGCTTA | 5691 | WTANQGL | 7358 | 123.566 |
| 713 | GTCTTCCGGGAAGGCATCGTG | 5692 | VFREGIV | 7359 | 123.54 |
| 714 | CAGGTGCAGCATGAGAGGGTG | 5693 | QVQHERV | 7360 | 123.5 |
| 715 | CAAATATTAAACTACTCAGTC | 5694 | QILNYSV | 7361 | 123.4 |
| 716 | AGTACGATTGGTAATTCTACT | 5695 | STIGNST | 7362 | 123.3029 |
| 717 | CCTATACACCACGGTTCATCC | 5696 | PIHHGSS | 7363 | 123.09 |
| 718 | ATTGCTACTAATGTGATTTAT | 5697 | IATNVIY | 7364 | 123.055 |
| 719 | CAAGGCGGTACAAACAACCCC | 5698 | QGGTNNP | 7365 | 123.037 |
| 720 | ACCCGTGGCAACGACATATCA | 5699 | TRGNDIS | 7366 | 123.023 |
| 721 | CAAACGCTCATAGTGGGGTCC | 5700 | QTLIVGS | 7367 | 123.007 |
| 722 | CGGGGTCTGCCTGATGTTAAT | 5701 | RGLPDVN | 7368 | 122.952 |
| 723 | CTTAATGTGAATACGCTTAAT | 5702 | LNVNTLN | 7369 | 122.896 |
| 724 | GGGACAAAAAGCTGGCCTGTC | 5703 | GTKSWPV | 7370 | 122.8432 |
| 725 | ACGCATCTTGTGAGTGATTCG | 5704 | THLVSDS | 7371 | 122.78 |
| 726 | TGGACGGGCGCACAACCTTCT | 5705 | WTGAQPS | 7372 | 122.73955 |
| 727 | TCTGCGATGCACACATTAGTC | 5706 | SAMHTLV | 7373 | 122.5735 |
| 728 | TCCCAACACCACACGCCACTG | 5707 | SQHHTPL | 7374 | 122.4691 |
| 729 | GATAATCGGATGGAGGCTACG | 5708 | DNRMEAT | 7375 | 122.416 |
| 730 | TTGGGAGGAACCCTGGGAATA | 5709 | LGGTLGI | 7376 | 122.38 |
| 731 | TTTCATAATGAGTCTTATGGG | 5710 | FHNESYG | 7377 | 122.36 |
| 732 | ATTCGGACTTCTGTGATTAAT | 5711 | IRTSVIN | 7378 | 122.333 |
| 733 | TATAATACTGTTGATCAGCGG | 5712 | YNTVDQR | 7379 | 122.2905 |
| 734 | GCGCACCAAACCGCCGGGCCA | 5713 | AHQTAGP | 7380 | 122.22 |
| 735 | CCTCCGGAAAGTGCCAGGGGC | 5714 | PPESARG | 7381 | 122.2044 |
| 736 | AATAATACTTTGAATATTTTG | 5715 | NNTLNIL | 7382 | 122.18 |
| 737 | GCTAGTTATAGTAGTATGGTG | 5716 | ASYSSMV | 7383 | 122.0975 |
| 738 | TCGGGTCAAAACGGTACATCA | 5717 | SGQNGTS | 7384 | 122.017 |
| 739 | TTGTCTAGTATGAGTACGGAT | 5718 | LSSMSTD | 7385 | 121.935 |
| 740 | GTCGCCTCGATGGTACACAAC | 5719 | VASMVHN | 7386 | 121.8215 |
| 741 | ACGCAATTGTCAGACGGCTGC | 5720 | TQLSDGC | 7387 | 121.81 |
| 742 | GCGATTGTGGATAGGGGGAGT | 5721 | APVDRGS | 7388 | 121.757 |
| 743 | AACCGTCAAAGGGACTTCGAA | 5722 | NRQRDFE | 7389 | 121.734 |
| 744 | GCACACCAAAAAGACATACGC | 5723 | AHQKDIR | 7390 | 121.7 |
| 745 | TTCACCGAACGCGCACTCCAA | 5724 | FTERALQ | 7391 | 121.6915 |
| 746 | ATGCTGTCTCATGGTGCGCTT | 5725 | MLSHGAL | 7392 | 121.682 |
| 747 | TCCGTAACCAACGGAGCGGAA | 5726 | SVTNGAE | 7393 | 121.549 |
| 748 | ATCACCGCCGCGTCACCGCAA | 5727 | ITAASPQ | 7394 | 121.5325 |
| 749 | CAAAACACGCAACGATACTTG | 5728 | QNTQRYL | 7395 | 121.5036 |
| 750 | ACTGGCCAAGGATTCTCGGCA | 5729 | TGQGFSA | 7396 | 121.45 |
| 751 | AGTTTTGAGAAGAATGGTATT | 5730 | SFEKNGI | 7397 | 121.45 |
| 752 | CTCACGTCCCACTCTGCGGGC | 5731 | LTSHSAG | 7398 | 121.378 |
| 753 | TCTACAATCGGCAACAGCACG | 5732 | STIGNST | 7399 | 121.27 |
| 754 | GGTCTTAGTCGGAATGATGGT | 5733 | GLSRNDG | 7400 | 121.2415 |
| 155 | TCGACGACGCACCCTTCCGAA | 5734 | STTHPSE | 7401 | 121.238 |
| 756 | CCAAGTACGAACGAAAGCCGC | 5735 | PSTNESR | 7402 | 121.099 |
| 757 | GGTACGAAGGATATTCTGATT | 5736 | GTKDILI | 7403 | 121.039 |
| 758 | TCTACTATTAATATGCGTGCG | 5737 | STINMRA | 7404 | 120.929 |
| 759 | TATATTGCTGGGGGGGAGCAG | 5738 | YIAGGEQ | 7405 | 120.9 |
| 760 | TCCAGCGGCCAACCGCTCGTC | 5739 | SSGQPLV | 7406 | 120.7415 |
| 761 | GACAAACAACAAACCGGACAA | 5740 | DKQQTGQ | 7407 | 120.6775 |
| 762 | GGGCTAGGACAACCCCAACTC | 5741 | GLGQPQL | 7408 | 120.644 |
| 763 | AGTCCGCAGCATGGTGTTATT | 5742 | SPQHGVI | 7409 | 120.6145 |
| 764 | TATAGGGGTAGGGAGGATTGG | 5743 | YRGREDW | 7410 | 120.58 |
| 765 | GCGGGGGGTTTGCTGTCGCGG | 5744 | AGGLLSR | 7411 | 120.552 |
| 766 | CCGATACAACAAGCCTCATTG | 5745 | PIQQASL | 7412 | 120.375 |
| 767 | TGGAGCGCCGGCGAACGGGTG | 5746 | WSAGERV | 7413 | 120.3415 |
| 768 | AGGGGTGATGTTGCTACGACG | 5747 | RGDVATT | 7414 | 120.26 |
| 769 | TTAACGGGACAAAACGAATTC | 5748 | LTGQNEF | 7415 | 120.24 |
| 770 | ACGACGCCGCCTTTTTCTAAT | 5749 | TTPPFSN | 7416 | 120.2205 |
| 771 | ACGAGTATTGGTAGTGCTAAG | 5750 | TSIGSAK | 7417 | 120.195 |
| 772 | AATGTGCAGAATGTGCCTGGG | 5751 | NVQNVPG | 7418 | 120.16215 |
| 773 | TATACGGGTACTCTTGTTGTT | 5752 | YTGTLVV | 7419 | 120.047 |
| 774 | GGAACCCACGCCTCAGCATAC | 5753 | GTHASAY | 7420 | 119.959 |
| 775 | CTGGTTGTTTCGAATAGTCTG | 5754 | LWSNSL | 7421 | 119.934 |
| 776 | ACGCATCTTGTGAGGGATTCG | 5755 | THLVRDS | 7422 | 119.7893 |
| 777 | AATCATGGTCGTGCTATTGAT | 5756 | NHGRAID | 7423 | 119.776 |
| 778 | CCCAAAACTCTAACTTCGACA | 5757 | PKTLTST | 7424 | 119.754 |
| 779 | TTCGGTATAGGGCACGGAACA | 5758 | FGIGHGT | 7425 | 119.734 |
| 780 | GCGCTTCCGTCTCGTGAGCGG | 5759 | ALPSRER | 7426 | 119.7235 |
| 781 | GCGACTAGGGGTGAGTCGTCT | 5760 | ATRGESS | 7427 | 119.715 |
| 782 | GGGACAACCGAAGTTAACAAA | 5761 | GTTEVNK | 7428 | 119.685 |
| 783 | ACCCACACCCTTGGGGGAACA | 5762 | THTLGGT | 7429 | 119.68 |
| 784 | GAAGCAGTAACAAGTAAATGG | 5763 | EAVTSKW | 7430 | 119.6575 |
| 785 | CACTACGGTAACAAAGACATA | 5764 | HYGNKDI | 7431 | 119.643 |
| 786 | ATTTCTACGCATACGATGACG | 5765 | ISTHTMT | 7432 | 119.64 |
| 787 | GATACGTATAATAGTAATACT | 5766 | DTYNSNT | 7433 | 119.6 |
| 788 | GTTTTTACTGGGCAGACGGAG | 5767 | VFTGQTE | 7434 | 119.544 |
| 789 | TCGGTCACCAGTGGAACACAA | 5768 | SVTSGTQ | 7435 | 119.502 |
| 790 | CATACGTATTCGCAGGCTGAT | 5769 | HTYSQAD | 7436 | 119.47455 |
| 791 | GTAGCGGGCTTAGTCGACATA | 5770 | VAGLVDI | 7437 | 119.41 |
| 792 | GACTCTACCAAAGCCATGCAA | 5771 | DSTKAMQ | 7438 | 119.403 |
| 793 | GAGGGGCATAATCGTGGTATT | 5772 | EGHNRGI | 7439 | 119.354 |
| 794 | GGGTTGCATGGGACGAGTAAT | 5773 | GLHGTSN | 7440 | 119.343 |
| 795 | CCGCTTTCTCTTCATAATAGT | 5774 | PLSLHNS | 7441 | 119.312 |
| 796 | GCGAGTGATAAGGGGGCGAAT | 5775 | ASDKGAN | 7442 | 119.249 |
| 797 | GTGCTGTTGCAGAATTCTCAT | 5776 | VLLQNSH | 7443 | 119.2225 |
| 798 | CTATACGACGGAAAACACGTC | 5777 | LYDGKHV | 7444 | 119.20995 |
| 799 | ACCCAAGGATCTAACACCACA | 5778 | TQGSNTT | 7445 | 119.08 |
| 800 | TTCCTCGACAAATACAACTAC | 5779 | FLDKYNY | 7446 | 119.058 |
| 801 | GACACCGGAATCAAAAACGTT | 5780 | DTGIKNV | 7447 | 119.05 |
| 802 | TCCGGAGCGGCACAAAACCCA | 5781 | SGAAQNP | 7448 | 119.019 |
| 803 | ACCCTCCACACCAAAGACCTA | 5782 | TLHTKDL | 7449 | 118.854 |
| 804 | GCTACTTACGTTGTCGGAACA | 5783 | ATYWGT | 7450 | 118.84 |
| 805 | CTTGTGGGGACTTTGGTGTAT | 5784 | LVGTLVY | 7451 | 118.809 |
| 806 | TCTAATACGACTGTGCAGCTT | 5785 | SNTTVQL | 7452 | 118.76 |
| 807 | AAGGCTCAGATTAATCAGATG | 5786 | KAQINQM | 7453 | 118.727 |
| 808 | CGGAATGCTACTGTGACTGTT | 5787 | RNATVTV | 7454 | 118.655 |
| 809 | GCAACCAGAGTGGGCAACCAC | 5788 | ATRVGNH | 7455 | 118.599 |
| 810 | AGTTATCAGAATCCTCCGCCT | 5789 | SYQNPPP | 7456 | 118.512 |
| 811 | TTTGATAGTTATAATATTGTG | 5790 | FDSYNIV | 7457 | 118.51 |
| 812 | GCTACTCTTTCTCCGCATGCT | 5791 | ATLSPHA | 7458 | 118.497 |
| 813 | TGGGAGAGTCCGACTAATGCG | 5792 | WESPTNA | 7459 | 118.49 |
| 814 | ATCGAAAACGTAAACCACTTG | 5793 | IENVNHL | 7460 | 118.42 |
| 815 | TATCGGGCTTCGGATGTGGCG | 5794 | YRASDVA | 7461 | 118.372 |
| 816 | CATATGTCTTCTGTTGCGACT | 5795 | HMSSVAT | 7462 | 118.34 |
| 817 | ATCCAAAGAGACGTGGGCCAC | 5796 | IQRDVGH | 7463 | 118.2825 |
| 818 | GAGAGTGTTAGGGAGACTATT | 5797 | ESVRETI | 7464 | 118.25 |
| 819 | CAGGGGGGGAATAGTCGGTTT | 5798 | QGGNSRF | 7465 | 118.236 |
| 820 | GAAAAAGGCACACCAAGTAGC | 5799 | EKGTPSS | 7466 | 118.233 |
| 821 | CACGACAGCACAACCCGCCCA | 5800 | HDSTTRP | 7467 | 118.225 |
| 822 | TTACCAACAGGCGTCCTGCCC | 5801 | LPTGVLP | 7468 | 118.2065 |
| 823 | ACCCTAGGCTACCCAGACAAA | 5802 | TLGYPDK | 7469 | 118.1855 |
| 824 | GCTAACACCGTCACAGAACGA | 5803 | ANTVTER | 7470 | 118.17415 |
| 825 | CACGACAAATCTATCCAACCA | 5804 | HDKSIQP | 7471 | 118.16 |
| 826 | GGAGGAACAGCCCTTGGGAGC | 5805 | GGTALGS | 7472 | 118.123 |
| 827 | GGGGGTAACTACCACACCACT | 5806 | GGNYHTT | 7473 | 118.046 |
| 828 | ATCTCAGAAATGACTAGGTAC | 5807 | ISEMTRY | 7474 | 118.041 |
| 829 | GTTGAATCTAAATCCGAACCA | 5808 | VESKSEP | 7475 | 118.026 |
| 830 | GACCGTGCCCAAAACAACGAA | 5809 | DRAQNNE | 7476 | 118.006 |
| 831 | ACGGCGCAGACCGGCTGGGTT | 5810 | TAQTGWV | 7477 | 117.96 |
| 832 | GGGTTCGGGCACCTGCCCGAA | 5811 | GFGHLPE | 7478 | 117.86 |
| 833 | CCTATTACGGGTTTTAGTGTT | 5812 | PITGFSV | 7479 | 117.828 |
| 834 | GATAGGACGTATTCGAATACG | 5813 | DRTYSNT | 7480 | 117.7875 |
| 835 | ATGTCAAACGCCTCCTACATA | 5814 | MSNASYI | 7481 | 117.743 |
| 836 | GATAATAGTAGGCCTGAGGTG | 5815 | DNSRPEV | 7482 | 117.658 |
| 837 | TCAAGTTCCCAAACGGTTTTG | 5816 | SSSQTVL | 7483 | 117.655 |
| 838 | AGTAATCTTGATGGTACTATT | 5817 | SNLDGTI | 7484 | 117.643 |
| 839 | AGTAATATGCGTGAGGAGATT | 5818 | SNMREEI | 7485 | 117.629 |
| 840 | AGACTTACAGAACTGGTCATA | 5819 | RLTELVI | 7486 | 117.583 |
| 841 | CAGGTTAGTCTGGTGAAGTTG | 5820 | QVSLVKL | 7487 | 117.558 |
| 842 | GAAATACACACGACCACAGGC | 5821 | EIHTTTG | 7488 | 117.5505 |
| 843 | AGCAGGATAGAAAACAACAAC | 5822 | SRIENNN | 7489 | 117.5425 |
| 844 | GGAACAGGCAAAGAAGTTCGA | 5823 | GTGKEVR | 7490 | 117.521 |
| 845 | TGGCAGGATCATAATAAGGTG | 5824 | WQDHNKV | 7491 | 117.476 |
| 846 | TCGACAAACTCTATAGGCGCC | 5825 | STNSIGA | 7492 | 117.414 |
| 847 | TCCGAATTAATGGTCAGACCC | 5826 | SELMVRP | 7493 | 117.3623 |
| 848 | CCGCTTCAGAATAATAAGACG | 5827 | PLQNNKT | 7494 | 117.2175 |
| 849 | CCTTATGCGAATAGGCTTGAG | 5828 | PYANRLE | 7495 | 117.21145 |
| 850 | GGGACGGTTTCGCTTATTCCT | 5829 | GTVSLIP | 7496 | 117.175 |
| 851 | GATGTTTATCTTAAGAGTCCG | 5830 | DVYLKSP | 7497 | 117.1435 |
| 852 | TTGCCGGATAAGGGGCGGATT | 5831 | LPDKGRI | 7498 | 117.116 |
| 853 | TCGATAACGACCGTAGCGAAC | 5832 | SITTVAN | 7499 | 117.112 |
| 854 | CCGCTTCAATCCCAATCGGGA | 5833 | PLQSQSG | 7500 | 117.1045 |
| 855 | AATAATATGGGTCATGGTCAT | 5834 | NNMGHGH | 7501 | 117.0365 |
| 856 | AGCGGACAAAAAAACTCAGAA | 5835 | SGQKNSE | 7502 | 116.9665 |
| 857 | ACCGAAGCGGGCCGCCCCCAA | 5836 | TEAGRPQ | 7503 | 116.907 |
| 858 | ACCTTACACACGAAAGACTTG | 5837 | TLHTKDL | 7504 | 116.879 |
| 859 | CTTCGAGACCTAAACGGAGGA | 5838 | LRDLNGG | 7505 | 116.8691 |
| 860 | GTTTGTGTTACTACTTGTGCT | 5839 | VCVTTCA | 7506 | 116.861 |
| 861 | GTCACAGCTGCTCAACCCCAA | 5840 | VTAAQPQ | 7507 | 116.79 |
| 862 | GCGACTTTTAGTCATGCTGGT | 5841 | ATFSHAG | 7508 | 116.788 |
| 863 | ACTTATGCGCCTAGGTCGCCT | 5842 | TYAPRSP | 7509 | 116.75715 |
| 864 | ACGTCGGAGATGCGTACTGCT | 5843 | TSEMRTA | 7510 | 116.5885 |
| 865 | TACTCGACAACCATGCTTAAC | 5844 | YSTTMLN | 7511 | 116.584 |
| 866 | TCTTTCACGAACACAAACCCA | 5845 | SFTNTNP | 7512 | 116.5665 |
| 867 | AGTCCTCCTAGTACGTCGGGT | 5846 | SPPSTSG | 7513 | 116.551 |
| 868 | GTGACGACTGTTGATAGTGCT | 5847 | VTTVDSA | 7514 | 116.477 |
| 869 | GAGGCGCATAATCGTGTTATT | 5848 | EAHNRVI | 7515 | 116.461 |
| 870 | ATGGAGTTGACTTCTACTAGT | 5849 | MELTSTS | 7516 | 116.456 |
| 871 | CATTTGGTTACTAGTGGTATT | 5850 | HLVTSGI | 7517 | 116.45 |
| 872 | CAAACCATCACCTCACAAATG | 5851 | QTITSQM | 7518 | 116.431 |
| 873 | ACTGCGAATAGTACGTATGTG | 5852 | TANSTYV | 7519 | 116.329 |
| 874 | CTTATCCAATTATCGGGTCAA | 5853 | LIQLSGQ | 7520 | 116.317 |
| 875 | TCTTACGTTAGCGTCCCCGCC | 5854 | SYVSVPA | 7521 | 116.3005 |
| 876 | GTGCATGGGAATGCTCCGGCT | 5855 | VHGNAPA | 7522 | 116.2665 |
| 877 | GCCGGAAAAACCCACGCCGAC | 5856 | AGKTHAD | 7523 | 116.228 |
| 878 | ACATTCCACCAAGGGGTCAAA | 5857 | TFHQGVK | 7524 | 116.175 |
| 879 | TTAGGAAACAACCGGCCACTA | 5858 | LGNNRPL | 7525 | 116.17 |
| 880 | CTGCACCTCGTCCGGAGCTTC | 5859 | LHLVRSF | 7526 | 116.08 |
| 881 | TCCTACAGTACTTCAACACCG | 5860 | SYSTSTP | 7527 | 116.036 |
| 882 | ATATCGCAAGGCTCGAGCCTC | 5861 | ISQGSSL | 7528 | 116.025 |
| 883 | CTCCAACTGGCTACATCCCAC | 5862 | LQLATSH | 7529 | 116.0035 |
| 884 | GTGACTCAGCGGTTTGCTGAG | 5863 | VTQRFAE | 7530 | 115.952 |
| 885 | GCTATAGACTCCATCAAAATG | 5864 | AIDSIKM | 7531 | 115.9415 |
| 886 | GACGCACACACTTTCAGCCGG | 5865 | DAHTFSR | 7532 | 115.93 |
| 887 | CGTGGTTCAGACGGAGGATTG | 5866 | RGSDGGL | 7533 | 115.911 |
| 888 | TTAGCACAAGGCACGGACCGG | 5867 | LAQGTDR | 7534 | 115.884 |
| 889 | AAAAACAACAACTCAGACAGT | 5868 | KNNNSDS | 7535 | 115.7595 |
| 890 | GAAAACGAAAAACGAGAAAGC | 5869 | ENEKRES | 7536 | 115.741 |
| 891 | AACGAACAATTCGAAAAAGTC | 5870 | NEQFEKV | 7537 | 115.705 |
| 892 | ACACAAGTAGTCGCAAGAACA | 5871 | TQWART | 7538 | 115.68045 |
| 893 | GGAGTAAACGTCACCAACAGC | 5872 | GVNVTNS | 7539 | 115.64 |
| 894 | GCCGACAAAGGATTCGGCCAC | 5873 | ADKGFGH | 7540 | 115.5886 |
| 895 | ACTCATAAGCAGGTGGATCTT | 5874 | THKQVDL | 7541 | 115.54825 |
| 896 | TCGGCTAACTTATACAAACAA | 5875 | SANLYKQ | 7542 | 115.544 |
| 897 | AAGCTGCATACTAAGGATCTT | 5876 | KLHTKDL | 7543 | 115.54 |
| 898 | GTGGTGGTTCACACTATCCCA | 5877 | VVVHTIP | 7544 | 115.52 |
| 899 | TCTACGTCTCAGGCTGTGCAG | 5878 | STSQAVQ | 7545 | 115.496 |
| 900 | CGTAACGGCTCCGCCCAAAGC | 5879 | RNGSAQS | 7546 | 115.465 |
| 901 | CATTATGGGAATAAGGATATT | 5880 | HYGNKDI | 7547 | 115.402 |
| 902 | AGCTTCTTGGTAGCCCACCCA | 5881 | SFLVAHP | 7548 | 115.4 |
| 903 | CAGCAGAATACGAGTTTGCCG | 5882 | QQNTSLP | 7549 | 115.39 |
| 904 | ATGCACGTCGACAAAACGAGT | 5883 | MHVDKTS | 7550 | 115.379 |
| 905 | AATAATGAGAATACGCGTAAT | 5884 | NNENTRN | 7551 | 115.363 |
| 906 | TCGATAAACAACATAGGCGCA | 5885 | SINNIGA | 7552 | 115.3425 |
| 907 | GCTACTATATCGGACCGAGCC | 5886 | ATISDRA | 7553 | 115.327 |
| 908 | TACTCAAACCTCGTACTTTCC | 5887 | YSNLVLS | 7554 | 115.285 |
| 909 | ATGATGAATGTGAGTGGTCAT | 5888 | MMNVSGH | 7555 | 115.2555 |
| 910 | GGGGAGACGCGGTCGACTGCT | 5889 | GETRSTA | 7556 | 115.18 |
| 911 | ACGAAGGGTTATAATGATCTT | 5890 | TKGYNDL | 7557 | 115.1635 |
| 912 | GCGTATAATATGTCGTCTGTT | 5891 | AYNMSSV | 7558 | 115.148 |
| 913 | GCAGACCCCGCTAAAGGCAAA | 5892 | ADPAKGK | 7559 | 115.1435 |
| 914 | TATATTTCGGCGCCTCCGATG | 5893 | YISAPPM | 7560 | 115.1145 |
| 915 | CGAAACAACCCATCGCACGAC | 5894 | RNNPSHD | 7561 | 115.069 |
| 916 | GGAACCTCCATAGACTACGTA | 5895 | GTSIDYV | 7562 | 115.053 |
| 917 | GGCACCGGGTACCCAAACCAA | 5896 | GTGYPNQ | 7563 | 115.038 |
| 918 | GATCATATGAATTTGAGGTCT | 5897 | DHMNLRS | 7564 | 114.9475 |
| 919 | ATTAATTCGTATTTGCATGAG | 5898 | INSYLHE | 7565 | 114.887 |
| 920 | TGGCAAATGGGGGCCGGGAGC | 5899 | WQMGAGS | 7566 | 114.833 |
| 921 | ATGGGTATCGGGTCATACAAA | 5900 | MGIGSYK | 7567 | 114.827 |
| 922 | CAAAACCACAACGAACTAAAA | 5901 | QNHNELK | 7568 | 114.749 |
| 923 | GATAAGTCTAATTATAGTATT | 5902 | DKSNYSI | 7569 | 114.736 |
| 924 | ACAACGAAACCGGTCGCGGAA | 5903 | TTKPVAE | 7570 | 114.7315 |
| 925 | GTGACTGTGAGTAATAGTCTG | 5904 | VTVSNSL | 7571 | 114.685 |
| 926 | ACGGCGTATCTGGATGGTCTG | 5905 | TAYLDGL | 7572 | 114.665 |
| 927 | AATTTGCAGACTGGTGTTCAG | 5906 | NLQTGVQ | 7573 | 114.65 |
| 928 | ACCGTCGCTCCCTACAGTAGC | 5907 | TVAPYSS | 7574 | 114.65 |
| 929 | GTTCAGATTTCTATGAATAAT | 5908 | VQISMNN | 7575 | 114.617 |
| 930 | TACATAGCAGGTGGTGAACAA | 5909 | YIAGGEQ | 7576 | 114.60015 |
| 931 | TTCATGGAAGTCATGAAAAAC | 5910 | FMEVMKN | 7577 | 114.547 |
| 932 | ACGACTGATAAGGGTATTAAT | 5911 | TFDKGIN | 7578 | 114.539 |
| 933 | TTGAGCTACAGCATCCAACAC | 5912 | LSYSIQH | 7579 | 114.53 |
| 934 | GCTTATAATGCTCGTCTGCCT | 5913 | AYNARLP | 7580 | 114.49305 |
| 935 | AACACCGGCACCACGAGTGTC | 5914 | NTGTTSV | 7581 | 114.475 |
| 936 | GTGCTGAGTACGGGGCTGCGG | 5915 | VLSTGLR | 7582 | 114.4165 |
| 937 | AACGACTCCTCGTCAATGTCC | 5916 | NDSSSMS | 7583 | 114.397 |
| 938 | CGCCAAGGCAGCTTGATGATA | 5917 | RQGSLMI | 7584 | 114.37 |
| 939 | ATCAGCACCGCATACATGTTG | 5918 | ISTAYML | 7585 | 114.36 |
| 940 | GGTACTATGAATATTGGTATT | 5919 | GTMNIGI | 7586 | 114.356 |
| 941 | CATAATAATAATTTGCTGAAT | 5920 | HNNNLLN | 7587 | 114.292 |
| 942 | CATTTTTCGCAGATTACTAAT | 5921 | HFSQITN | 7588 | 114.278 |
| 943 | GACCTGACCAGAGCTGCAATA | 5922 | DLTRAAI | 7589 | 114.256 |
| 944 | GTCGCTATGGGAGGCGGTCCC | 5923 | VAMGGGP | 7590 | 114.1845 |
| 945 | GCCTACGGTATCAGAGAAGTG | 5924 | AYGIREV | 7591 | 114.1465 |
| 946 | ACATCAGACGGTCTACTAAGT | 5925 | TSDGLLS | 7592 | 114.128 |
| 947 | ACGATGGCTACAAACTTAAGT | 5926 | TMATNLS | 7593 | 114.082 |
| 948 | AACAACGGCAACTCATCAAGG | 5927 | NNGNSSR | 7594 | 114.047 |
| 949 | ACGGAGAAGGCGAGTCCTCTG | 5928 | TEKASPL | 7595 | 114.031 |
| 950 | CTCAACCACACAATGCCCCTC | 5929 | LNHTMPL | 7596 | 114.027 |
| 951 | GATACGGCGAGTTATAATAAT | 5930 | DTASYNN | 7597 | 114 |
| 952 | AACATGACCAACGAACGGCTC | 5931 | NMTNERL | 7598 | 113.9675 |
| 953 | GTAGTCTCATCGGGCGGCTGG | 5932 | WSSGGW | 7599 | 113.966 |
| 954 | GTGAATCAGAGTCCTGGGGCT | 5933 | VNQSPGA | 7600 | 113.85 |
| 955 | GATCATCATCCTCAGAGTCGT | 5934 | DHHPQSR | 7601 | 113.83 |
| 956 | CGATGGCAAGGACTGAGCGCG | 5935 | RWQGLSA | 7602 | 113.76 |
| 957 | GCGGTTACGACAAGCGTGAGG | 5936 | AVTTSVR | 7603 | 113.752 |
| 958 | TGGGGAGTCAGTAACTCAGCA | 5937 | WGVSNSA | 7604 | 113.7505 |
| 959 | GCGCATATGCATTCGGAGTTG | 5938 | AHMHSEL | 7605 | 113.74 |
| 960 | AATAATCTTACGAATTCGACG | 5939 | NNLTNST | 7606 | 113.736 |
| 961 | AGTAGTGGGGGTATGAAGGCG | 5940 | SSGGMKA | 7607 | 113.69 |
| 962 | GTTGGGTATGGGGAGCATGTT | 5941 | VGYGEHV | 7608 | 113.64 |
| 963 | ACCATAGTGTCCACTTCTTAC | 5942 | TIVSTSY | 7609 | 113.628 |
| 964 | CCCACCAGTCACCAAGAACCC | 5943 | PTSHQEP | 7610 | 113.62 |
| 965 | TCTAACCTTCGAAACACAATA | 5944 | SNLRNTI | 7611 | 113.58 |
| 966 | TCAAGACACGACGTCCGAAAC | 5945 | SRHDVRN | 7612 | 113.559 |
| 967 | CAGATGAATATTCATGATAAG | 5946 | QMNIHDK | 7613 | 113.543 |
| 968 | TGGGCTATGAATAATGTGCCG | 5947 | WAMNNVP | 7614 | 113.531 |
| 969 | GCGATGGATGGGTATAGGGTT | 5948 | AMDGYRV | 7615 | 113.462 |
| 970 | AAAGGGGGAAACCTCACCGCA | 5949 | KGGNLTA | 7616 | 113.4525 |
| 971 | ATTGGTAAGGATAGTGTTCCG | 5950 | IGKDSVP | 7617 | 113.448 |
| 972 | GTGCAGTTGACGCATAATGGG | 5951 | VQLTHNG | 7618 | 113.43 |
| 973 | GGCCTGAACCAGATCACATCG | 5952 | GLNQITS | 7619 | 113.4 |
| 974 | AGGGGTGATCCTTCTACGCCT | 5953 | RGDPSTP | 7620 | 113.4 |
| 975 | GTTCCCTCCGACCCCCACTGG | 5954 | VPSDPHW | 7621 | 113.35 |
| 976 | ACGTTAAGTTCCCAAGTCACA | 5955 | TLSSQVT | 7622 | 113.327 |
| 977 | AACCAAAGAGTTGAACAAAAA | 5956 | NQRVEQK | 7623 | 113.3075 |
| 978 | GTACTTCCAAGTCGGATCGCG | 5957 | VLPSRIA | 7624 | 113.3 |
| 979 | GGGCACTACGCTACAAACACA | 5958 | GHYATNT | 7625 | 113.212 |
| 980 | CCTTCGATTCCGTCGTTTTCG | 5959 | PSIPSFS | 7626 | 113.207 |
| 981 | ACTTATGAGTATCCGACTCGG | 5960 | TYEYPTR | 7627 | 113.19 |
| 982 | AAAGACCACATCCTCAGCCTC | 5961 | KDHILSL | 7628 | 113.1795 |
| 983 | GGCACAGGAGGTAACCGAGAA | 5962 | GTGGNRE | 7629 | 113.173 |
| 984 | AAGGGGGATGGTGCTTATGAG | 5963 | KGDGAYE | 7630 | 113.162 |
| 985 | TCTTCTTTCGGAAAAGACAAC | 5964 | SSFGKDN | 7631 | 113.1603 |
| 986 | ACAGTATCGTCATACGTACAA | 5965 | TVSSYVQ | 7632 | 113.0595 |
| 987 | AGGGCTCATGGGGATAATCAG | 5966 | RAHGDNQ | 7633 | 113.036 |
| 988 | TATCATGCTCATAGTAATGAG | 5967 | YHAHSNE | 7634 | 113.03 |
| 989 | GCAAACTTGCCCAGCGGTCAC | 5968 | ANLPSGH | 7635 | 113.03 |
| 990 | GCGAACCTCAACTTGACCAGT | 5969 | ANLNLTS | 7636 | 113.015 |
| 991 | AGGCTTAATGCGGGTGAGCAT | 5970 | RLNAGEH | 7637 | 113.0105 |
| 992 | TATGTTGATTATAGTAAGTCG | 5971 | YVDYSKS | 7638 | 112.9935 |
| 993 | GCTAATTCTGGGTTGCATAAT | 5972 | ANSGLHN | 7639 | 112.9695 |
| 994 | ACGAGTGGTGTGCTTACGCGG | 5973 | TSGVLTR | 7640 | 112.9485 |
| 995 | GGAAAACCAGCACAAGAATTC | 5974 | GKPAQEF | 7641 | 112.933 |
| 996 | GTGGGGACGCATTTGCATTCG | 5975 | VGTHLHS | 7642 | 112.918 |
| 997 | CCGATGAACAAAGACATACTG | 5976 | PMNKDIL | 7643 | 112.9116 |
| 998 | GACGCCCACCACTCAAGCAGC | 5977 | DAHHSSS | 7644 | 112.88 |
| 999 | ACTAACGCCATCTCTCAAACG | 5978 | TNAISQT | 7645 | 112.7997 |
| 1000 | GTTTTGTCTGATAAGGCGTAT | 5979 | VLSDKAY | 7646 | 112.787 |
| 1001 | AACCTACTTGTCGACCAACGT | 5980 | NLLVDQR | 7647 | 112.78 |
| 1002 | ACTGGTCATCCGCCGGCGGCG | 5981 | TGHPPAA | 7648 | 112.7735 |
| 1003 | ATTAGTTCGGGGATTTTGTCG | 5982 | ISSGILS | 7649 | 112.7205 |
| 1004 | AATACGAATTTGTTGGGTTAT | 5983 | NTNLLGY | 7650 | 112.72 |
| 1005 | ACGCTATCGGTTACCCTGGGT | 5984 | TLSVTLG | 7651 | 112.71 |
| 1006 | CATACTGGTGTTCAGACTAAT | 5985 | HTGVQTN | 7652 | 112.704 |
| 1007 | GAGGTTAGTAATAATAATTAT | 5986 | EVSNNNY | 7653 | 112.69 |
| 1008 | CTGGCTAATATTTCGCTGTAT | 5987 | LANISLY | 7654 | 112.69 |
| 1009 | GTGGAGCATGTTGCTCATCAG | 5988 | VEHVAHQ | 7655 | 112.656 |
| 1010 | GTCGACAAAAGCGAAGCCGAC | 5989 | VDKSEAD | 7656 | 112.6 |
| 1011 | GGCTTCGCATTAACTGGCACC | 5990 | GFALTGT | 7657 | 112.564 |
| 1012 | TTGTTGACGGCTCCGCATAGG | 5991 | LLTAPHR | 7658 | 112.53 |
| 1013 | AATGCGGGGGCTCTTATGGGT | 5992 | NAGALMG | 7659 | 112.518 |
| 1014 | AGGACGCAAGCAGGGGACTCA | 5993 | RTQAGDS | 7660 | 112.483 |
| 1015 | AACACACACAGACAAGAATAC | 5994 | NTHRQEY | 7661 | 112.461 |
| 1016 | AACATAGCAGGCGGAGAACAA | 5995 | NIAGGEQ | 7662 | 112.442 |
| 1017 | GAGATTAATAATCGGACTGGT | 5996 | EINNRTG | 7663 | 112.43235 |
| 1018 | ACCGTTAACACAATGTACACG | 5997 | TVNTMYT | 7664 | 112.4 |
| 1019 | CCTATGAATGGTATTCTGTTG | 5998 | PMNGILL | 7665 | 112.388 |
| 1020 | AATCCTAGTTATGATCATCGG | 5999 | NPSYDHR | 7666 | 112.363 |
| 1021 | GCTGTTATTCTGAATCCTGTT | 6000 | AVILNPV | 7667 | 112.36 |
| 1022 | CTGTACGGGGGAGCACACCAA | 6001 | LYGGAHQ | 7668 | 112.3455 |
| 1023 | CAAGTCAACCAACCGAGAATA | 6002 | QVNQPRI | 7669 | 112.33 |
| 1024 | GCTGTTAGAACACCGGCAATG | 6003 | AVRTPAM | 7670 | 112.326 |
| 1025 | AGTTTGACGCCTAATAATCTT | 6004 | SLTPNNL | 7671 | 112.283 |
| 1026 | CTTGGGCAGGTTAATTCTACG | 6005 | LGQVNST | 7672 | 112.205 |
| 1027 | GCTAATTCTGCTACTAATCAG | 6006 | ANSATNQ | 7673 | 112.1605 |
| 1028 | TCCTTGACGGAAAAAGCGCCG | 6007 | SLTEKAP | 7674 | 112.15 |
| 1029 | CAATTCCACGGGACATCTGAA | 6008 | QFHGTSE | 7675 | 112.125 |
| 1030 | AAAAACGGCGCCATAGGAACA | 6009 | KNGAIGT | 7676 | 112.0867 |
| 1031 | GTGCTGGCGTCGACTGAGAAG | 6010 | VLASTEK | 7677 | 112.058 |
| 1032 | AGTAATATGAGTGAGGCGATT | 6011 | SNMSEAI | 7678 | 112.02 |
| 1033 | AACGCTAACGCCGGTGGAAAC | 6012 | NANAGGN | 7679 | 112.0148 |
| 1034 | CACTCTAACACACACTACGAA | 6013 | HSNTHYE | 7680 | 112.005 |
| 1035 | AGTGCTTTGATTAGTGTGGTT | 6014 | SALISW | 7681 | 111.993 |
| 1036 | GTGGCGACTCATTATAATGAG | 6015 | VATHYNE | 7682 | 111.971 |
| 1037 | AACCAAACGTTACAAGTAGAC | 6016 | NQTLQVD | 7683 | 111.97 |
| 1038 | AAAACACCCTCAGCTTCAGAA | 6017 | KTPSASE | 7684 | 111.957 |
| 1039 | GGTGAATCACGTACAAACATG | 6018 | GESRTNM | 7685 | 111.9393 |
| 1040 | CGGAATGAGCCGGTTAGTACT | 6019 | RNEPVST | 7686 | 111.912 |
| 1041 | GCAACACACGCCATGCGCCCA | 6020 | ATHAMRP | 7687 | 111.9005 |
| 1042 | TGGGAATCCCTCTCCAACGCA | 6021 | WESLSNA | 7688 | 111.885 |
| 1043 | CATAGTCCTCCTACGACTATG | 6022 | HSPPTTM | 7689 | 111.847 |
| 1044 | TCTACCATGAACACGATCACG | 6023 | STMNTIT | 7690 | 111.8162 |
| 1045 | AACATGGAACACACCATGGCG | 6024 | NMEHTMA | 7691 | 111.78965 |
| 1046 | CATAATACGGAGTCTAAGACT | 6025 | HNTESKT | 7692 | 111.778 |
| 1047 | CACAACTTAATGACCCAAATA | 6026 | HNLMTQI | 7693 | 111.77 |
| 1048 | AACCAAAACACCTACGAACTG | 6027 | NQNTYEL | 7694 | 111.756 |
| 1049 | TACGCCACTCTCGACACCATC | 6028 | YATLDTI | 7695 | 111.752 |
| 1050 | GTTCAGTTGGAGAATGCGAAT | 6029 | VQLENAN | 7696 | 111.7215 |
| 1051 | GGGCTCACAGGATACACAATG | 6030 | GLTGYTM | 7697 | 111.71 |
| 1052 | TTAGTACTTGACTCACGGAAC | 6031 | LVLDSRN | 7698 | 111.704 |
| 1053 | ATGTTGGTACAAAACACACCC | 6032 | MLVQNTP | 7699 | 111.702 |
| 1054 | CCTCATAATCAGGAGATGGGT | 6033 | PHNQEMG | 7700 | 111.6865 |
| 1055 | TCGTTGGGGGATGCGATGTTG | 6034 | SLGDAML | 7701 | 111.6776 |
| 1056 | CGCGCCGAAGGGAGCTCTGGC | 6035 | RAEGSSG | 7702 | 111.6645 |
| 1057 | AGTGAGGAGAGGACGCGTGCG | 6036 | SEERTRA | 7703 | 111.616 |
| 1058 | TCTAGTAAGGAGCGTACATCG | 6037 | SSKERTS | 7704 | 111.57 |
| 1059 | CCTGTTGTGAGGGATCGTTCT | 6038 | PVVRDRS | 7705 | 111.5643 |
| 1060 | AGGATGTCTGAGAGTTCGGAT | 6039 | RMSESSD | 7706 | 111.51 |
| 1061 | AACCAATCTATAAGCATGGAC | 6040 | NQSISMD | 7707 | 111.491 |
| 1062 | GTCGCTGTATCGAACACTCCA | 6041 | VAVSNTP | 7708 | 111.482 |
| 1063 | GGAGACATCTCAAGCAGAAAC | 6042 | GDISSRN | 7709 | 111.4603 |
| 1064 | GCTGCCGGAGCCGACTCTCCA | 6043 | AAGADSP | 7710 | 111.429 |
| 1065 | TTCGGCACATCGTACACAACC | 6044 | FGTSYTT | 7711 | 111.401 |
| 1066 | CGTGATACTAATACGGATAAG | 6045 | RDTNTDK | 7712 | 111.336 |
| 1067 | GGGTCTACGCCGGGGGCGAGT | 6046 | GSTPGAS | 7713 | 111.327 |
| 1068 | GGTACTAATCATGATTTTTCG | 6047 | GTNHDFS | 7714 | 111.302 |
| 1069 | AATGAGAGTACGAAGGAGAGT | 6048 | NESTKES | 7715 | 111.2845 |
| 1070 | GTGCATGTGACTAATGTGTTG | 6049 | VHVTNVL | 7716 | 111.2295 |
| 1071 | AGTACTACTAATGTTGCGTAT | 6050 | STTNVAY | 7717 | 111.2015 |
| 1072 | ATTACGTCGTTGAATGGGATG | 6051 | ITSLNGM | 7718 | 111.1615 |
| 1073 | GAAGTACGGGGCAGCGTGCCA | 6052 | EVRGSVP | 7719 | 111.1435 |
| 1074 | GCACTTACCCGTATGCCTAAC | 6053 | ALTRMPN | 7720 | 111.1235 |
| 1075 | CTCAGTGTAGCCGACAGGCCA | 6054 | LSVADRP | 7721 | 111.06 |
| 1076 | GTTTCTACGGCGCAGAGGCAG | 6055 | VSTAQRQ | 7722 | 111.056 |
| 1077 | TTAAACGCAGAATACACCAAC | 6056 | LNAEYTN | 7723 | 111.02 |
| 1078 | AATGAGAAGCCGCAGTCGACG | 6057 | NEKPQST | 7724 | 111.009 |
| 1079 | TTGAATACGCTGATTGATAAG | 6058 | LNTLIDK | 7725 | 111.003 |
| 1080 | GTCACACACACACTGATCGAA | 6059 | VTHTLIE | 7726 | 110.987 |
| 1081 | GAGCAGAAGAAGACTGATCAT | 6060 | EQKKTDH | 7727 | 110.936 |
| 1082 | ACATCAGGCATGTACGACACG | 6061 | TSGMYDT | 7728 | 110.92 |
| 1083 | CCTGACGCAGCGCGTAGCCCG | 6062 | PDAARSP | 7729 | 110.916 |
| 1084 | TTGACGCAGGTTTATCATGAG | 6063 | LTQVYHE | 7730 | 110.91 |
| 1085 | AGAGAAATGAGCAGCCTATCT | 6064 | REMSSLS | 7731 | 110.891 |
| 1086 | ATGCCTTCGAAAGGCGAAGTA | 6065 | MPSKGEV | 7732 | 110.816 |
| 1087 | AATGAGCAGAATACGCCGAGT | 6066 | NEQNTPS | 7733 | 110.79 |
| 1088 | AAAAACTACGCAAGCACCGAC | 6067 | KNYASTD | 7734 | 110.7435 |
| 1089 | TGTATGGATGTTGGTAAGGCG | 6068 | CMDVGKA | 7735 | 110.711 |
| 1090 | GCTCTTCATAATCTGATGAAT | 6069 | ALHNLMN | 7736 | 110.711 |
| 1091 | CCTGACAGAGCGAACGACAAA | 6070 | PDRANDK | 7737 | 110.6835 |
| 1092 | ATTGCTCATGTGTCTACTAAT | 6071 | IAHVSTN | 7738 | 110.6805 |
| 1093 | AACGGTCCGACCGGATCCGCC | 6072 | NGPTGSA | 7739 | 110.6652 |
| 1094 | TCTACTCATCATGCTGATCGT | 6073 | STHHADR | 7740 | 110.629 |
| 1095 | GGTTCGCAGTATGGGCGGCAT | 6074 | GSQYGRH | 7741 | 110.629 |
| 1096 | ACCGGAACGGCTACACTCCCA | 6075 | TGTATLP | 7742 | 110.5825 |
| 1097 | AAAGCCCACGTTGTAGAAATA | 6076 | KAHWEI | 7743 | 110.5795 |
| 1098 | ACTTCGCAGGGTAGGAGTCCT | 6077 | TSQGRSP | 7744 | 110.511 |
| 1099 | TTATCCTCCGAATCACCCAGG | 6078 | LSSESPR | 7745 | 110.5015 |
| 1100 | ACCGGGGTTCGAGAAACCATA | 6079 | TGVRETI | 7746 | 110.4575 |
| 1101 | ATGGATACTGAGCTTTATAGG | 6080 | MD TEL YR | 7747 | 110.4475 |
| 1102 | ACACCTGAAGCGAGCGCTCGC | 6081 | TPEASAR | 7748 | 110.44 |
| 1103 | CACGACTTGAACCACGGAAAA | 6082 | HDLNHGK | 7749 | 110.428 |
| 1104 | CTTACTGGTCAGAATGCGATT | 6083 | LTGQNAI | 7750 | 110.416 |
| 1105 | ACCGTCGGATCGAACAGTATA | 6084 | TVGSNSI | 7751 | 110.411 |
| 1106 | CATACTGTGGGGGCTATGCAT | 6085 | HTVGAMH | 7752 | 110.41 |
| 1107 | GAACGAGTCAACGGGATGGCA | 6086 | ERVNGMA | 7753 | 110.405 |
| 1108 | TCCGAACCCCTTAGAGTTGGA | 6087 | SEPLRVG | 7754 | 110.3725 |
| 1109 | GTCTCTAACGTCCTCTACAGC | 6088 | VSNVLYS | 7755 | 110.346 |
| 1110 | TTCTCCTCCGGAACAACCATA | 6089 | FSSGTTI | 7756 | 110.3 |
| 1111 | ACAAACCTAAGTCAATCGGCC | 6090 | TNLSQSA | 7757 | 110.24435 |
| 1112 | CCTAATACTGCTAGTAATTTT | 6091 | PNTASNF | 7758 | 110.2274 |
| 1113 | TGCGGCCTGAACTGCGGTAAA | 6092 | CGLNCGK | 7759 | 110.211 |
| 1114 | CCGACCGGAGGCTCACCACCA | 6093 | PTGGSPP | 7760 | 110.201 |
| 1115 | TACCTAGAATCCAACTACACC | 6094 | YLESNYT | 7761 | 110.18 |
| 1116 | ACATTAGAAACAACCCGCAGC | 6095 | TLETTRS | 7762 | 110.167 |
| 1117 | TCCGCTAACGAACACAACCAC | 6096 | SANEHNH | 7763 | 110.137 |
| 1118 | GCACGAGTGGACACCAACCAA | 6097 | ARVDTNQ | 7764 | 110.09 |
| 1119 | AACGTGGTGAAAAACAACACA | 6098 | NVVKNNT | 7765 | 110.077 |
| 1120 | GGTTCTTATTCTGATGGTAGT | 6099 | GSYSDGS | 7766 | 110.0355 |
| 1121 | CCCGGTAACGGACAAAGTCCG | 6100 | PGNGQSP | 7767 | 110.0275 |
| 1122 | TCGGGGGTAAACTTCGGAGTA | 6101 | SGVNFGV | 7768 | 109.998 |
| 1123 | CGAATCAACGCAGCAATCGAC | 6102 | RINAAID | 7769 | 109.99675 |
| 1124 | CAAGCTGGGAACGCGCCAAGG | 6103 | QAGNAPR | 7770 | 109.98825 |
| 1125 | CAGTCGGGGTCTCTGGTGCCG | 6104 | QSGSLVP | 7771 | 109.962 |
| 1126 | TTCTCAACGCAAGACATAAGC | 6105 | FSTQDIS | 7772 | 109.948 |
| 1127 | GTGAATCCGCATCCTGCGCAG | 6106 | VNPHPAQ | 7773 | 109.948 |
| 1128 | AAAGGCCACGCCTACGAAGCC | 6107 | KGHAYEA | 7774 | 109.897 |
| 1129 | GAAGACAGTATGAGATTCTCT | 6108 | EDSMRFS | 7775 | 109.874 |
| 1130 | GGTAGGAATGAGAGTCCGGAG | 6109 | GRNESPE | 7776 | 109.855 |
| 1131 | TCCGACGGATCGAAACTACTA | 6110 | SDGSKLL | 7777 | 109.8205 |
| 1132 | ACTCTCTCAGGCTACATGAGA | 6111 | TLSGYMR | 7778 | 109.808 |
| 1133 | GATATTCATAATCCGCGTACG | 6112 | DIHNPRT | 7779 | 109.789 |
| 1134 | TGGGCCAAAGACGTCAACGTC | 6113 | WAKDVNV | 7780 | 109.782 |
| 1135 | GCTGTGGGGCGGTCGGATGAT | 6114 | AVGRSDD | 7781 | 109.711 |
| 1136 | AAAGAAAAAACCACCCGCGAA | 6115 | KEKTTRE | 7782 | 109.697 |
| 1137 | CTGCTCCAATCGACCTACTTG | 6116 | LLQSTYL | 7783 | 109.672 |
| 1138 | AAGTCTAATTTGGAGGGTAAG | 6117 | KSNLEGK | 7784 | 109.6285 |
| 1139 | ACGAGGACGCCTTTTCTGGGG | 6118 | TRTPFLG | 7785 | 109.613 |
| 1140 | CAGTCGGATACGACTTCGATT | 6119 | QSDTTSI | 7786 | 109.605 |
| 1141 | GCGTGGTCTCAAGTCCTGACG | 6120 | AWSQVLT | 7787 | 109.587 |
| 1142 | ACTCAAGAACGACCACTAATC | 6121 | TQERPLI | 7788 | 109.56 |
| 1143 | GATGATAAGACTGGTCGGTAT | 6122 | DDKTGRY | 7789 | 109.549 |
| 1144 | TTTCCTTCGCATAATGGGGCG | 6123 | FPSHNGA | 7790 | 109.54 |
| 1145 | ATGCTGTCTCAAGTCTTAACA | 6124 | MLSQVLT | 7791 | 109.536 |
| 1146 | TCTGTGACGACTAATCTGATG | 6125 | SVTTNLM | 7792 | 109.484 |
| 1147 | GAACACAACTCAAAAACTTAC | 6126 | EHNSKTY | 7793 | 109.4745 |
| 1148 | TATGCGCATCCTGTGACTCAT | 6127 | YAHPVTH | 7794 | 109.4635 |
| 1149 | CCTAATCCGTCTCCGAGGCAG | 6128 | PNPSPRQ | 7795 | 109.449 |
| 1150 | CATATGGGTTTGAATGAGCTT | 6129 | HMGLNEL | 7796 | 109.427 |
| 1151 | AACAGTTTGCAAGCAAGTGCA | 6130 | NSLQASA | 7797 | 109.402 |
| 1152 | GACCTCGGTACGGCTAGAACC | 6131 | DLGTART | 7798 | 109.388 |
| 1153 | TACGACAGCCGACTCTACGCG | 6132 | YDSRLYA | 7799 | 109.3853 |
| 1154 | CCGAAGCCTGGGACGGGGGAG | 6133 | PKPGTGE | 7800 | 109.3721 |
| 1155 | AGTCTGAATGGGGTGTTGGTT | 6134 | SLNGVLV | 7801 | 109.3685 |
| 1156 | CAGTCTAATTTGGTTATTAAT | 6135 | QSNLVIN | 7802 | 109.359 |
| 1157 | GCGTCTCCGGCGCAGACCGGC | 6136 | ASPAQTG | 7803 | 109.331 |
| 1158 | AACATGACCAACGAAAACGGA | 6137 | NMTNENG | 7804 | 109.324 |
| 1159 | TCACTTCGGACGGACGAATTC | 6138 | SLRTDEF | 7805 | 109.31815 |
| 1160 | ATATTGGACAACCACCGTTTC | 6139 | ILDNHRF | 7806 | 109.2685 |
| 1161 | TTGATTAATATGAGTCAGAAT | 6140 | LINMSQN | 7807 | 109.264 |
| 1162 | CCGCAAGACGTCCGCCAAACA | 6141 | PQDVRQT | 7808 | 109.2625 |
| 1163 | CCCTTCGTAGCGAACGAACCA | 6142 | PFVANEP | 7809 | 109.256 |
| 1164 | AATATTAATGATACTAAGAAT | 6143 | NINDTKN | 7810 | 109.253 |
| 1165 | AATTTTAGTAGTGGTGATGTT | 6144 | NFSSGDV | 7811 | 109.229 |
| 1166 | GAACGAAACGGACTAATAGAA | 6145 | ERNGLIE | 7812 | 109.215 |
| 1167 | AATTCTCATGTTCCTAATAAT | 6146 | NSHVPNN | 7813 | 109.2115 |
| 1168 | AACACAACCGGTAGCTCGGGC | 6147 | NTTGSSG | 7814 | 109.1925 |
| 1169 | TCAACCAGAAAAGAACACGAC | 6148 | STRKEHD | 7815 | 109.1875 |
| 1170 | GCTGCTAATCCTAGTACGGAG | 6149 | AANPSTE | 7816 | 109.1357 |
| 1171 | TCGGGTATGAATAGTAATAAG | 6150 | SGMNSNK | 7817 | 109.129 |
| 1172 | AAGACGCTTGATAATAATGCT | 6151 | KTLDNNA | 7818 | 109.09305 |
| 1173 | ACCGTAAAACAAACAAGTCCG | 6152 | TVKQTSP | 7819 | 109.0863 |
| 1174 | ATTTCTCAGGTGTCTTTTAAT | 6153 | ISQVSFN | 7820 | 109.082 |
| 1175 | TTAGAAGTAAACCTGCAAACG | 6154 | LEVNLQT | 7821 | 109.057 |
| 1176 | GAAATGCAAACCAAAAACGCC | 6155 | EMQTKNA | 7822 | 109.052 |
| 1177 | GCCGACAACAGAAACGACAAA | 6156 | ADNRNDK | 7823 | 109.008 |
| 1178 | GCGTATGATACGCTGAATAGT | 6157 | AYDTLNS | 7824 | 108.982 |
| 1179 | ACGATTCAGGATCATATTAAG | 6158 | TIQDHIK | 7825 | 108.942 |
| 1180 | GACCCCACTAAAGTTGGATCC | 6159 | DPTKVGS | 7826 | 108.939 |
| 1181 | TCCCTCCAACGAACCCCCGAC | 6160 | SLQRTPD | 7827 | 108.937 |
| 1182 | GCAAACGACTCTGCCAAAACA | 6161 | ANDSAKT | 7828 | 108.9125 |
| 1183 | AAAAAAGTCGAACAAGAACCA | 6162 | KKVEQEP | 7829 | 108.907 |
| 1184 | GCAAGTCGGGACCTGGGACAA | 6163 | ASRDLGQ | 7830 | 108.906 |
| 1185 | TGGGAGAGTGATAAGTTTCGT | 6164 | WESDKFR | 7831 | 108.876 |
| 1186 | AACCGCGGAACAGAAGTTTAC | 6165 | NRGTEVY | 7832 | 108.8187 |
| 1187 | AATATTAGTAGTATTAATCAG | 6166 | NISSINQ | 7833 | 108.8155 |
| 1188 | GCCTCGAAAGGCTTCGGCCAC | 6167 | ASKGFGH | 7834 | 108.7886 |
| 1189 | CAGTCGCAGAATGTGACTCAG | 6168 | QSQNVTQ | 7835 | 108.7825 |
| 1190 | AACGGATACCAACTACAAATC | 6169 | NGYQLQI | 7836 | 108.779 |
| 1191 | TGTACTAATGCGTCGGATCTT | 6170 | CTNASDL | 7837 | 108.74 |
| 1192 | ACCGTCGCCTCGCCCAACACC | 6171 | TVASPNT | 7838 | 108.738 |
| 1193 | AATACTGCTCCGCCGAATCAT | 6172 | NTAPPNH | 7839 | 108.733 |
| 1194 | CTTTCTCAACAACGCGACTAC | 6173 | LSQQRDY | 7840 | 108.69245 |
| 1195 | TGGAATCAGAATGTGTCTCAT | 6174 | WNQNVSH | 7841 | 108.6785 |
| 1196 | ACAGGTAGTTCAGACAGATTA | 6175 | TGSSDRL | 7842 | 108.676 |
| 1197 | AACACAACGCCACCTAACCAC | 6176 | NTTPPNH | 7843 | 108.602 |
| 1198 | GTGGTCGACTCAACATACCCG | 6177 | VVDSTYP | 7844 | 108.592 |
| 1199 | ACGGATGCTACGGGGAGGCAT | 6178 | TDATGRH | 7845 | 108.5905 |
| 1200 | TTGTTTACTGCTGGGAGTACT | 6179 | LFTAGST | 7846 | 108.58 |
| 1201 | TTGCGTGATCAGACTAGTATG | 6180 | LRDQTSM | 7847 | 108.566 |
| 1202 | ATCGAAACGGACCGCCACCGG | 6181 | IETDRHR | 7848 | 108.531 |
| 1203 | AGTGGGCCTGAGAATACGTTG | 6182 | SGPENTL | 7849 | 108.526 |
| 1204 | GACAACCAAAACGCCGACAGG | 6183 | DNQNADR | 7850 | 108.486 |
| 1205 | CATGATGGTTATGTTCCTAAT | 6184 | HDGYVPN | 7851 | 108.469 |
| 1206 | CATATGTCTAGTTATTCGTCG | 6185 | HMSSYSS | 7852 | 108.436 |
| 1207 | AGTCGTCTGCAGACTCAGCAG | 6186 | SRLQTQQ | 7853 | 108.4358 |
| 1208 | TCATACACAGCAGGAAGACCC | 6187 | SYTAGRP | 7854 | 108.417 |
| 1209 | GTGCAGCAGAATAATATTAAT | 6188 | VQQNNIN | 7855 | 108.376 |
| 1210 | GATGCGAAGGCTCTTACGACT | 6189 | DAKALTT | 7856 | 108.368 |
| 1211 | AAGGATGAGCATCTTCATTAT | 6190 | KDEHLHY | 7857 | 108.358 |
| 1212 | CACGGTGACCGAACAGCTTTA | 6191 | HGDRTAL | 7858 | 108.327 |
| 1213 | AATTTTACTATTACGGAGGCG | 6192 | NFTITEA | 7859 | 108.32 |
| 1214 | GACACTCACATGAACAAACTG | 6193 | DTHMNKL | 7860 | 108.316 |
| 1215 | CAACCAGGAGCCCCCCAAACC | 6194 | QPGAPQT | 7861 | 108.312 |
| 1216 | GGGGAAGCACGCCGAGAAGCC | 6195 | GEARREA | 7862 | 108.302 |
| 1217 | AAGTCTCTTAGTAGTGATGAT | 6196 | KSLSSDD | 7863 | 108.2375 |
| 1218 | ATGAATACGACTTATAATGAG | 6197 | MNTTYNE | 7864 | 108.231 |
| 1219 | GCGGCCGCACTAGAAACAATA | 6198 | AAALETI | 7865 | 108.223 |
| 1220 | AACGTCGCTCCCTACAGTAGC | 6199 | NVAPYSS | 7866 | 108.21595 |
| 1221 | TCTGCGGGTATGGTGAGTCTG | 6200 | SAGMVSL | 7867 | 108.2145 |
| 1222 | TGCGACTTGTCACAATCATGC | 6201 | CDLSQSC | 7868 | 108.133 |
| 1223 | GTTTTGATTACGATGAGTTCG | 6202 | VLITMSS | 7869 | 108.118 |
| 1224 | CAAGTTGGGGCTCTAATGGTT | 6203 | QVGALMV | 7870 | 108.037 |
| 1225 | CAACGTACCTCGGAAGCGCCA | 6204 | QRTSEAP | 7871 | 108.0315 |
| 1226 | TTGGGTAATGGTAGTTCTTTG | 6205 | LGNGSSL | 7872 | 108.0135 |
| 1227 | CCTAGTGTCCGTTTGCCCTTA | 6206 | PSVRLPL | 7873 | 108.007 |
| 1228 | GATTCTGCTCCGAGTACTATT | 6207 | DSAPSTI | 7874 | 108.003 |
| 1229 | AATTATAATGGGGTTAATGTG | 6208 | NYNGVNV | 7875 | 107.956 |
| 1230 | TCGGCTCATCAGACGCCGACG | 6209 | SAHQTPT | 7876 | 107.932 |
| 1231 | GATCATAGTAAGCAGATTTCG | 6210 | DHSKQIS | 7877 | 107.923 |
| 1232 | GCCGCCAGCTTGTCGCAAAGC | 6211 | AASLSQS | 7878 | 107.914 |
| 1233 | CACGCCGACGTTGGCATGAGC | 6212 | HADVGMS | 7879 | 107.888 |
| 1234 | CACGTGACAGTAACGTTAAAC | 6213 | HVTVTLN | 7880 | 107.8865 |
| 1235 | AATTCTACGCATATTAATTCG | 6214 | NSTHINS | 7881 | 107.8843 |
| 1236 | CTGGGGCTTGCTGGTCAGGTT | 6215 | LGLAGQV | 7882 | 107.884 |
| 1237 | AGCAGTCAAGCCCACGGCCCA | 6216 | SSQAHGP | 7883 | 107.872 |
| 1238 | GCTTTTAAGTCGGGTAGTATT | 6217 | AFKSGSI | 7884 | 107.866 |
| 1239 | CACTCCCCATCCCACGACTCG | 6218 | HSPSHDS | 7885 | 107.844 |
| 1240 | CCAAACGGCGAAAGTTCGCGA | 6219 | PNGESSR | 7886 | 107.8303 |
| 1241 | ATTCTTACGCCTTTGGATAAG | 6220 | ILTPLDK | 7887 | 107.825 |
| 1242 | TCCGCCTCTTACTCCAGGATG | 6221 | SASYSRM | 7888 | 107.815 |
| 1243 | GAGGCGTTGCATGATCGGAAT | 6222 | EALHDRN | 7889 | 107.793 |
| 1244 | GGTGAACAACACAACGCCCCC | 6223 | GEQHNAP | 7890 | 107.778 |
| 1245 | GGGAATATGGTTACGCCTAAT | 6224 | GNMVTPN | 7891 | 107.753 |
| 1246 | AACGCTCTCCTCAACGCACCT | 6225 | NALLNAP | 7892 | 107.742 |
| 1247 | GCAAGTGACCTACAAATGACG | 6226 | ASDLQMT | 7893 | 107.723 |
| 1248 | TCGTATGATATGCATACGAAT | 6227 | SYDMHTN | 7894 | 107.705 |
| 1249 | AATATGTCGCATAGTACTCTG | 6228 | NMSHSTL | 7895 | 107.6777 |
| 1250 | ACTGCCAACAACCACTCTCCG | 6229 | TANNHSP | 7896 | 107.671 |
| 1251 | CAAGCCCCGCCAACAGCACAA | 6230 | QAPPTAQ | 7897 | 107.668 |
| 1252 | AACTACCACGGAGACAACGTT | 6231 | NYHGDNV | 7898 | 107.637 |
| 1253 | AGGGATAGTACTATTAGTCGG | 6232 | RDSTISR | 7899 | 107.635 |
| 1254 | GTTTCTTCGCCTAATGGTACG | 6233 | VSSPNGT | 7900 | 107.6095 |
| 1255 | TCCCGAATCACGGTGAACGCA | 6234 | SRITVNA | 7901 | 107.593 |
| 1256 | GTCGGAACAACCTCGAACGGC | 6235 | VGTTSNG | 7902 | 107.575 |
| 1257 | CATACGAATCAGATGCAGCCT | 6236 | HTNQMQP | 7903 | 107.5573 |
| 1258 | AAAAGCAACGCGGGATTCGGT | 6237 | KSNAGFG | 7904 | 107.5065 |
| 1259 | AAAGAAAGCCTCGAAGACGTC | 6238 | KESLEDV | 7905 | 107.49 |
| 1260 | GCGCAGGTTAATAATCATGAT | 6239 | AQVNNHD | 7906 | 107.489 |
| 1261 | AACGCTTCTACCTACATGGAC | 6240 | NASTYMD | 7907 | 107.479 |
| 1262 | ACGTCTGATACGAATGCTAGG | 6241 | TSDTNAR | 7908 | 107.4605 |
| 1263 | GAGAGTCGTATGCGTAGTATT | 6242 | ESRMRSI | 7909 | 107.451 |
| 1264 | CGTGTTGAAGACACCAACTCC | 6243 | RVEDTNS | 7910 | 107.416 |
| 1265 | GCCTCTAACCACCTACAAGCC | 6244 | ASNHLQA | 7911 | 107.3863 |
| 1266 | CGCTTACACGGCTCAGACTCG | 6245 | RLHGSDS | 7912 | 107.358 |
| 1267 | ACCGTCGAACAAATAAACTCG | 6246 | TVEQINS | 7913 | 107.349 |
| 1268 | AGGTCCGTACCATCACCACAC | 6247 | RSVPSPH | 7914 | 107.343 |
| 1269 | GAATACCTCGCCCTGGGACAC | 6248 | EYLALGH | 7915 | 107.336 |
| 1270 | AATACTAATAATCAGGAGCAG | 6249 | NTNNQEQ | 7916 | 107.332 |
| 1271 | AACTACGGTTCCGGACGAATC | 6250 | NYGSGRI | 7917 | 107.3205 |
| 1272 | CGCCACGGGGACACACCGATG | 6251 | RHGDTPM | 7918 | 107.303 |
| 1273 | AACGACACCATCGGCAGACCA | 6252 | NDTIGRP | 7919 | 107.2995 |
| 1274 | TATGGGGAGCGTGCTAGGACG | 6253 | YGERART | 7920 | 107.297 |
| 1275 | GTTCTTGGGATGCAGAGGTCT | 6254 | VLGMQRS | 7921 | 107.295 |
| 1276 | CTTCATTTTCATGCTTCGCAG | 6255 | LHFHASQ | 7922 | 107.281 |
| 1277 | ACCGACACGCTCAGCGAAAGA | 6256 | TDTLSER | 7923 | 107.247 |
| 1278 | GGGACAGGTACCGTTGGATGG | 6257 | GTGTVGW | 7924 | 107.203 |
| 1279 | ACAGAAAGCCCCAAACTACTA | 6258 | TESPKLL | 7925 | 107.2015 |
| 1280 | ACGATTAGGAGTGAGGGTTTT | 6259 | TIRSEGF | 7926 | 107.1495 |
| 1281 | GCGTCTAGTTATATTAATAAT | 6260 | ASSYINN | 7927 | 107.144 |
| 1282 | TTACACCTTGGGTTATCATCT | 6261 | LHLGLSS | 7928 | 107.1415 |
| 1283 | GTCACTGGCACTACCCCGGGA | 6262 | VTGTTPG | 7929 | 107.137 |
| 1284 | GTGACGTCGTCTGCTAGTGGT | 6263 | VTSSASG | 7930 | 107.0606 |
| 1285 | CAAATGCACCTACACATGCAA | 6264 | QMHLHMQ | 7931 | 107.057 |
| 1286 | GGTACCATGAGTCTATTAATG | 6265 | GTMSLLM | 7932 | 107.046 |
| 1287 | TGCGCATCAGAAGTTTGCCAA | 6266 | CASEVCQ | 7933 | 107.035 |
| 1288 | AATCTTGTGATGAGTGGGACG | 6267 | NLVMSGT | 7934 | 107.0225 |
| 1289 | CAATCACTCAAAGACGGCACT | 6268 | QSLKDGT | 7935 | 106.991 |
| 1290 | GCGTTGAATGGTTCTGGTATT | 6269 | ALNGSGI | 7936 | 106.976 |
| 1291 | AGACACGTCGTCCCCGACTCC | 6270 | RHWPDS | 7937 | 106.9705 |
| 1292 | CTGTATCATGATTCGCATCTT | 6271 | LYHDSHL | 7938 | 106.963 |
| 1293 | GGGAGTACGCCTATTACTTCT | 6272 | GSTPITS | 7939 | 106.957 |
| 1294 | CCCAACGACCAAATCAGCGGA | 6273 | PNDQISG | 7940 | 106.936 |
| 1295 | AGTGGAAAACAAGACAAATAC | 6274 | SGKQDKY | 7941 | 106.925 |
| 1296 | AGTGGGCATGCTTCTCAGGGT | 6275 | SGHASQG | 7942 | 106.8675 |
| 1297 | AAGATGGGGAGTATTGAGGTT | 6276 | KMGSIEV | 7943 | 106.864 |
| 1298 | TCAACTTTAGACCGAAGCGAA | 6277 | STLDRSE | 7944 | 106.8615 |
| 1299 | ACGGAGCTTAGTGAGTATACT | 6278 | TELSEYT | 7945 | 106.852 |
| 1300 | GCCAACGGAGGAGGATACCCC | 6279 | ANGGGYP | 7946 | 106.847 |
| 1301 | GTAACCGAATCTAACTCTCTA | 6280 | VTESNSL | 7947 | 106.83 |
| 1302 | CCAGTCTACGACCGCGACGTC | 6281 | PVYDRDV | 7948 | 106.812 |
| 1303 | GATAATAATAAGCATGGTACT | 6282 | DNNKHGT | 7949 | 106.806 |
| 1304 | ATCTACGAAACCGTAACCTTG | 6283 | IYETVTL | 7950 | 106.801 |
| 1305 | ACTCAGACTGGTCATGTTTCT | 6284 | TQTGHVS | 7951 | 106.7868 |
| 1306 | CAAGCCGACCTCAGGTACAAA | 6285 | QADLRYK | 7952 | 106.773 |
| 1307 | TGTAAGACGAATAATGCTGGT | 6286 | CKTNNAG | 7953 | 106.749 |
| 1308 | GCCGGTCACCAACAACTGGCC | 6287 | AGHQQLA | 7954 | 106.7459 |
| 1309 | GATAGGGATATGGAGGGTGTT | 6288 | DRDMEGV | 7955 | 106.742 |
| 1310 | GATCAGCCGGGGTATGTGCGT | 6289 | DQPGYVR | 7956 | 106.7387 |
| 1311 | GATGCTATGCTTGCTCATCCG | 6290 | DAMLAHP | 7957 | 106.735 |
| 1312 | GCCCTTAACCTGTACTCCAGC | 6291 | ALNLYSS | 7958 | 106.732 |
| 1313 | CTACTATCTAAAGGGGACTCC | 6292 | LLSKGDS | 7959 | 106.709 |
| 1314 | TCGAGTATTAGTCTGCGGTAT | 6293 | SSISLRY | 7960 | 106.645 |
| 1315 | GGGTCGAGCCAACACCACGAA | 6294 | GSSQHHE | 7961 | 106.62 |
| 1316 | TCGATTGGGTATTCGCCTCCG | 6295 | SIGYSPP | 7962 | 106.5773 |
| 1317 | CACTCCAACGCGACTACGATA | 6296 | HSNATTI | 7963 | 106.567 |
| 1318 | TCGGCACACGACGCAAGACTA | 6297 | SAHDARL | 7964 | 106.5665 |
| 1319 | GTTCACACCGCAGACACAATA | 6298 | VHTADTI | 7965 | 106.564 |
| 1320 | CGAGACGGCTCTACTAAAGTT | 6299 | RDGSTKV | 7966 | 106.55855 |
| 1321 | TTGCAGGAGTCTCTTCCTGGT | 6300 | LQESLPG | 7967 | 106.542 |
| 1322 | TTAGACTACACCCCTCAAAAC | 6301 | LDYTPQN | 7968 | 106.519 |
| 1323 | GGACCAAGTTCGCACATCGTT | 6302 | GPSSHIV | 7969 | 106.507 |
| 1324 | AGCGCCGACACCCGGTCCCCC | 6303 | SADTRSP | 7970 | 106.466 |
| 1325 | ATGATGAAGAGTGAGGAGAAT | 6304 | MMKSEEN | 7971 | 106.425 |
| 1326 | GGTATGACGAGTGAGTTGACG | 6305 | GMTSELT | 7972 | 106.417 |
| 1327 | GTAGACACCTACAGCGGTCTG | 6306 | VDTYSGL | 7973 | 106.415 |
| 1328 | GGGATGAGGGATACGCCGCCG | 6307 | GMRDTPP | 7974 | 106.385 |
| 1329 | GAGCATGATGTGAGTACGCGT | 6308 | EHDVSTR | 7975 | 106.302 |
| 1330 | GAGGTGGTGAAGACTACTCAT | 6309 | EWKTTH | 7976 | 106.269 |
| 1331 | GTTTACGACAACGTTTCTTCT | 6310 | VYDNVSS | 7977 | 106.268 |
| 1332 | CTCATGAAAGACATGGAATCC | 6311 | LMKDMES | 7978 | 106.2609 |
| 1333 | CCTCTTCATGTTGCTTCTCCT | 6312 | PLHVASP | 7979 | 106.239 |
| 1334 | GAAGTACGCGACCAAAAAACA | 6313 | EVRDQKT | 7980 | 106.2075 |
| 1335 | CCAACTCCCTACTACACCGCC | 6314 | PTPYYTA | 7981 | 106.124 |
| 1336 | AACAACTACGCCTACTCCGCT | 6315 | NNYAYSA | 7982 | 106.1085 |
| 1337 | CTTGTTGATACGGATAGGAAT | 6316 | LVDTDRN | 7983 | 106.108 |
| 1338 | TATCCGGCTGATCATCGGACT | 6317 | YPADHRT | 7984 | 106.088 |
| 1339 | TCTGCAACAACGAACCACGGA | 6318 | SATTNHG | 7985 | 106.066 |
| 1340 | CGTGATGATCAGCAGCTTGAT | 6319 | RDDQQLD | 7986 | 106.064 |
| 1341 | GGAGCGGGACAATCTCACGTG | 6320 | GAGQSHV | 7987 | 106.0351 |
| 1342 | GATAGGACTTATCATGAGGTG | 6321 | DRTYHEV | 7988 | 105.996 |
| 1343 | GATGGTAATAATACGACTTAT | 6322 | DGNNTTY | 7989 | 105.99 |
| 1344 | GTGCATATGGAGTCGTATGCG | 6323 | VHMESYA | 7990 | 105.983 |
| 1345 | TGGTACGAAACAATCAGCCCG | 6324 | WYETISP | 7991 | 105.959 |
| 1346 | CTGTTGGGGGCTCATCAGCCG | 6325 | LLGAHQP | 7992 | 105.9002 |
| 1347 | CACGTACCTAACACTGAAGCA | 6326 | HVPNTEA | 7993 | 105.893 |
| 1348 | AATTCTCAGAATCCTCAGGGT | 6327 | NSQNPQG | 7994 | 105.8895 |
| 1349 | CTACAAGACCGGGCAACGAAC | 6328 | LQDRATN | 7995 | 105.864 |
| 1350 | ATTGTGAATCAGCATTCGGAG | 6329 | IVNQHSE | 7996 | 105.832 |
| 1351 | TTTGAGCAGGGTAAGGTTGAG | 6330 | FEQGKVE | 7997 | 105.811 |
| 1352 | GTGGCGACGGGTGTGTTTGCT | 6331 | VATGVFA | 7998 | 105.808 |
| 1353 | GACAAAATACAAAACGAAACA | 6332 | DKIQNET | 7999 | 105.784 |
| 1354 | ACGGACAACCCGTCCTACAAA | 6333 | TDNPSYK | 8000 | 105.771 |
| 1355 | GGCGTGAACACAAAAATCGAA | 6334 | GVNTKIE | 8001 | 105.7665 |
| 1356 | GGCTCTCACAACGGCCCAGCC | 6335 | GSHNGPA | 8002 | 105.763 |
| 1357 | TCCAACATGGGCGTAGCCTCT | 6336 | SNMGVAS | 8003 | 105.76 |
| 1358 | AACACGGACACTAACGAAAAA | 6337 | NTDTNEK | 8004 | 105.759 |
| 1359 | TCTGCGCTTTTGCGGATGGAT | 6338 | SALLRMD | 8005 | 105.707 |
| 1360 | CCTCAACTAAGCGGCACAGCG | 6339 | PQLSGTA | 8006 | 105.6914 |
| 1361 | TCTATTGTTAATAATGGGGCT | 6340 | SIVNNGA | 8007 | 105.684 |
| 1362 | AGCCTAGACCACGCCCCTCTA | 6341 | SLDHAPL | 8008 | 105.661 |
| 1363 | GACCACTCGAAACAAAACTCT | 6342 | DHSKQNS | 8009 | 105.653 |
| 1364 | CACAGTGACATGGTCAGCGGC | 6343 | HSDMVSG | 8010 | 105.642 |
| 1365 | CAGCATCGTGCGCAGGATGTG | 6344 | QHRAQDV | 8011 | 105.5608 |
| 1366 | GGTAGTACTAAGTCTGGGCAG | 6345 | GSTKSGQ | 8012 | 105.5509 |
| 1367 | ACAATGAGCGTAACTCTGGAA | 6346 | TMSVTLE | 8013 | 105.526 |
| 1368 | TATAATAATGGTGGGCATGTT | 6347 | YNNGGHV | 8014 | 105.516 |
| 1369 | GGTACTGCTGAGAATACGAGT | 6348 | GTAENTS | 8015 | 105.494 |
| 1370 | AATAGTTATGATGCGACGAGG | 6349 | NSYDATR | 8016 | 105.488 |
| 1371 | AGCGTCAACAACATGCGACTC | 6350 | SVNNMRL | 8017 | 105.4477 |
| 1372 | CTTAACTTACAATACACTCTG | 6351 | LNLQYTL | 8018 | 105.443 |
| 1373 | GAGGCGCAGACCGGCTGGGTT | 6352 | EAQTGWV | 8019 | 105.443 |
| 1374 | CCCGCTGAAGGAAACAACCGT | 6353 | PAEGNNR | 8020 | 105.442 |
| 1375 | TCTCTGGGTGGGAATCCGCCT | 6354 | SLGGNPP | 8021 | 105.4335 |
| 1376 | TATAATAGGGATAATGGTTCT | 6355 | YNRDNGS | 8022 | 105.4285 |
| 1377 | TTGACTGATCCTAAGGGGCAG | 6356 | LTDPKGQ | 8023 | 105.404 |
| 1378 | ACCCCAACAGGCACCAACAAA | 6357 | TPTGTNK | 8024 | 105.403 |
| 1379 | GTTCACGCTAACGCTACATTA | 6358 | VHANATL | 8025 | 105.38 |
| 1380 | CGCGAAATAGTGCACTCAAAC | 6359 | REIVHSN | 8026 | 105.376 |
| 1381 | TACGCCGTCGCGATAGGCACA | 6360 | YAVAIGT | 8027 | 105.366 |
| 1382 | AACACAACACCTCCCGACCAC | 6361 | NTTPPDH | 8028 | 105.348 |
| 1383 | GTTATTCAGTCTGATAATACG | 6362 | VIQSDNT | 8029 | 105.32 |
| 1384 | GTTCCGGCGCATTCTCGGGGT | 6363 | VPAHSRG | 8030 | 105.305 |
| 1385 | CAAAACAGTGACCTCGCCAGC | 6364 | QNSDLAS | 8031 | 105.296 |
| 1386 | CGCATCGTAGACACGTTGGGA | 6365 | RIVDTLG | 8032 | 105.2825 |
| 1387 | CACACTTACTCACAAGCAGAC | 6366 | HTYSQAD | 8033 | 105.267 |
| 1388 | ACGGCTCCATCCGTAGGGTCT | 6367 | TAPSVGS | 8034 | 105.259 |
| 1389 | AACGTGGGCACCGACAGAGAC | 6368 | NVGTDRD | 8035 | 105.231 |
| 1390 | GGGATTAATCGTACTAGTGAG | 6369 | GINRTSE | 8036 | 105.2145 |
| 1391 | GTAGAAACAGACAGCTTAATA | 6370 | VETDSLI | 8037 | 105.195 |
| 1392 | CACTCCGCAGCGGGTGACGGT | 6371 | HSAAGDG | 8038 | 105.195 |
| 1393 | GATGCTGGGATTAGTTCTTAT | 6372 | DAGISSY | 8039 | 105.102 |
| 1394 | TGCACCGCCACAAAATGCTCA | 6373 | CTATKCS | 8040 | 105.0959 |
| 1395 | CGCATAGACACTCTCCTAGTC | 6374 | RIDTLLV | 8041 | 105.089 |
| 1396 | GTATCACAATCACACGACGTG | 6375 | VSQSHDV | 8042 | 105.087 |
| 1397 | GCACTACCATCCCACTCCTCC | 6376 | ALPSHSS | 8043 | 105.059 |
| 1398 | GGGAAACCTGCGGAAGCGCCG | 6377 | GKPAEAP | 8044 | 105.055 |
| 1399 | TGGAATAGTCCGGGTGAGGCG | 6378 | WNSPGEA | 8045 | 105.053 |
| 1400 | AGGCTGGAGCGTCCGGATTAT | 6379 | RLERPDY | 8046 | 105.04 |
| 1401 | ACGCGGGAGAGTCTGGTGGAT | 6380 | TRESLVD | 8047 | 105.022 |
| 1402 | AGACACGAAGGTCCGTACTCC | 6381 | RHEGPYS | 8048 | 105.002 |
| 1403 | GTTTTGTCTGATAAGGCGTTT | 6382 | VLSDKAF | 8049 | 104.981 |
| 1404 | ACTAGTGCGACTGATTCGATG | 6383 | TSATDSM | 8050 | 104.908 |
| 1405 | ACTGAGCCGCTTCCGATGTCT | 6384 | TEPLPMS | 8051 | 104.869 |
| 1406 | ATGCCTTACGTCGGGACAGTA | 6385 | MPYVGTV | 8052 | 104.838 |
| 1407 | CGTGATTATTCTCCTACTGAT | 6386 | RDYSPTD | 8053 | 104.836 |
| 1408 | CGGAATGGTGGTACTACGGAT | 6387 | RNGGTTD | 8054 | 104.7625 |
| 1409 | ATGATGGGCGCGACAACGAAA | 6388 | MMGATTK | 8055 | 104.7503 |
| 1410 | GCTGCCGTTGGCGGAGACACC | 6389 | AAVGGDT | 8056 | 104.742 |
| 1411 | CTTGTGAATAATGATGGGACT | 6390 | LVNNDGT | 8057 | 104.7255 |
| 1412 | AGTTCGACTCCGCAGGATACT | 6391 | SSTPQDT | 8058 | 104.713 |
| 1413 | AGTCTGCGGATGGAGAATAGT | 6392 | SLRMENS | 8059 | 104.7025 |
| 1414 | GTGCAGGGGCAGACCGGCTGG | 6393 | VQGQTGW | 8060 | 104.688 |
| 1415 | CTAGGTTTCACACCCCAACCG | 6394 | LGFTPQP | 8061 | 104.677 |
| 1416 | TCGGTTGCTAAGGATCAGACG | 6395 | SVAKDQT | 8062 | 104.675 |
| 1417 | CCGCGGCATGAGTTGAGTAAT | 6396 | PRHELSN | 8063 | 104.645 |
| 1418 | AAAATGGGATCGAACCCCGCA | 6397 | KMGSNPA | 8064 | 104.6241 |
| 1419 | GAGGCGACTCATGGTTCTTAT | 6398 | EATHGSY | 8065 | 104.613 |
| 1420 | CCTGAGGTTGCGTGTCCTGGG | 6399 | PEVACPG | 8066 | 104.595 |
| 1421 | GTGAATACGCGGGAGGTTACG | 6400 | VNTREVT | 8067 | 104.583 |
| 1422 | ACGGCTCGTGCGATTGATATG | 6401 | TARAIDM | 8068 | 104.551 |
| 1423 | ACCGACGGCGCCCTGGGTTAC | 6402 | TDGALGY | 8069 | 104.5325 |
| 1424 | GGGTCGCAATACGCGAACCGC | 6403 | GSQYANR | 8070 | 104.524 |
| 1425 | GAAATGGGTAACCAATACCCA | 6404 | EMGNQYP | 8071 | 104.453 |
| 1426 | CCGTCGACACTCGCTGAAACA | 6405 | PSTLAET | 8072 | 104.449 |
| 1427 | CGCATAGGCGTTGGAGCACCA | 6406 | RIGVGAP | 8073 | 104.4405 |
| 1428 | CTGAGTGTGAAGGAGGAGATT | 6407 | LSVKEEI | 8074 | 104.435 |
| 1429 | TATACTACTCATGAGAGTGGG | 6408 | YTTHESG | 8075 | 104.433 |
| 1430 | CTTACTGCTGTTCTGACTGTT | 6409 | LTAVLTV | 8076 | 104.424 |
| 1431 | CTGCAGACTTCTGTTGCTACT | 6410 | LQTSVAT | 8077 | 104.42 |
| 1432 | ACTGTGCGTTCGCCTCAGCCG | 6411 | TVRSPQP | 8078 | 104.391 |
| 1433 | CATCCTGATGGTACTCGGCCG | 6412 | HPDGTRP | 8079 | 104.375 |
| 1434 | GGAGTAACAATCGGTAGCAGG | 6413 | GVTIGSR | 8080 | 104.3732 |
| 1435 | ACATACGCCTCTACTGAAGCG | 6414 | TYASTEA | 8081 | 104.3675 |
| 1436 | AGGAGTAGTCCTGCGACGAAT | 6415 | RSSPATN | 8082 | 104.355 |
| 1437 | ATCGGGTCGCCGTTGGCCAAC | 6416 | IGSPLAN | 8083 | 104.35 |
| 1438 | GCGTCGACTGAGTCTCATGTG | 6417 | ASTESHV | 8084 | 104.344 |
| 1439 | ATTGCGCAGAATGAGACGTAT | 6418 | IAQNETY | 8085 | 104.336 |
| 1440 | ATGGAGTCTAAGCCGTGGCAG | 6419 | MESKPWQ | 8086 | 104.307 |
| 1441 | TTAGAAAACCCAACACCAGCA | 6420 | LENPTPA | 8087 | 104.305 |
| 1442 | CCCAACCCCAGTCCAAGACAA | 6421 | PNPSPRQ | 8088 | 104.258 |
| 1443 | TCGACTAGTAATCCGCCTTAT | 6422 | STSNPPY | 8089 | 104.242 |
| 1444 | TATTTGACGGATACTCCTACT | 6423 | YLTDTPT | 8090 | 104.241 |
| 1445 | ATACGTGCATTGATGACGGAC | 6424 | IRALMTD | 8091 | 104.237 |
| 1446 | CCTATGGGTACGGATACGGTT | 6425 | PMGTDTV | 8092 | 104.221 |
| 1447 | ACGAGGACTCAGGGGACGTCT | 6426 | TRTQGTS | 8093 | 104.19625 |
| 1448 | TCTAATAATATGAATCAGGCG | 6427 | SNNMNQA | 8094 | 104.187 |
| 1449 | GAAGACTCTGTAAACCACATC | 6428 | EDSVNHI | 8095 | 104.185 |
| 1450 | TCTGTTGTGCCTACGGATAAG | 6429 | SWPTDK | 8096 | 104.174 |
| 1451 | GTGCGCGGCGTTCAAGACGCC | 6430 | VRGVQDA | 8097 | 104.167 |
| 1452 | CATGATGTGACTGTGCGGAAT | 6431 | HDVTVRN | 8098 | 104.164 |
| 1453 | CATAATAATCATGCGGGTGAG | 6432 | HNNHAGE | 8099 | 104.153 |
| 1454 | GGTAATATGAATCATAGTATT | 6433 | GNMNHSI | 8100 | 104.15 |
| 1455 | GGTGTGCATACTCATACTGTT | 6434 | GVHTHTV | 8101 | 104.139 |
| 1456 | TTTTTGCCGCAGCTGGGGCAG | 6435 | FLPQLGQ | 8102 | 104.094 |
| 1457 | TTGGCCAACATGTCCGCACCA | 6436 | LANMSAP | 8103 | 104.093 |
| 1458 | GTTCGCAGAGACGAAACACCT | 6437 | VRRDETP | 8104 | 104.0585 |
| 1459 | TGCCGCGACAACGTCTTAGCT | 6438 | CRDNVLA | 8105 | 104.046 |
| 1460 | ATGTTGGCTTCTCGGGTGCCT | 6439 | MLASRVP | 8106 | 104.0205 |
| 1461 | GTCAGAACAGTCCTTCAACAA | 6440 | VRTVLQQ | 8107 | 104.017 |
| 1462 | TCGAATCAGAATGTGGATTGG | 6441 | SNQNVDW | 8108 | 104 |
| 1463 | ACTGAGGTTACGGGGGATAGT | 6442 | TEVTGDS | 8109 | 103.965 |
| 1464 | GAAAGTGCCACATCTCTAAAA | 6443 | ESATSLK | 8110 | 103.9355 |
| 1465 | AACCACCCCGCACCAAGCTCA | 6444 | NHPAPSS | 8111 | 103.9235 |
| 1466 | TACGGTAACGCGAACACCGTA | 6445 | YGNANTV | 8112 | 103.92115 |
| 1467 | CAAAACGACAAATCTGACAAC | 6446 | QNDKSDN | 8113 | 103.9165 |
| 1468 | AGTCAGGCTCAGATTCGTGTT | 6447 | SQAQIRV | 8114 | 103.915 |
| 1469 | TTTCAGCGTGATGTTGGTCAT | 6448 | FQRDVGH | 8115 | 103.8651 |
| 1470 | CTGATGAATCGTAATGCTCCT | 6449 | LMNRNAP | 8116 | 103.8648 |
| 1471 | GCGGGCAGTTCGCCATCACGC | 6450 | AGSSPSR | 8117 | 103.8635 |
| 1472 | TTATTCCACAGCCAAATGACC | 6451 | LFHSQMT | 8118 | 103.849 |
| 1473 | ATGATGTCTAACAGCCTCGCG | 6452 | MMSNSLA | 8119 | 103.8275 |
| 1474 | GTTACCACCGTCCTCCAATCA | 6453 | VTTVLQS | 8120 | 103.818 |
| 1475 | GGTAGTCAGCGTGCTATGAAT | 6454 | GSQRAMN | 8121 | 103.8086 |
| 1476 | GCATCCGGCGCACGCTACGTC | 6455 | ASGARYV | 8122 | 103.7981 |
| 1477 | AAAAACTACGACAGTGACTCA | 6456 | KNYDSDS | 8123 | 103.794 |
| 1478 | GTGGGTTCTGGGGTTGGGGTT | 6457 | VGSGVGV | 8124 | 103.793 |
| 1479 | CGTTCTGACCTTACTGAAAGT | 6458 | RSDLTES | 8125 | 103.736 |
| 1480 | AGGGCGGAGTTTATTGATACG | 6459 | RAEFIDT | 8126 | 103.735 |
| 1481 | ACATCTGAAATGCGGACAGCC | 6460 | TSEMRTA | 8127 | 103.725 |
| 1482 | GAGTTGGATCATCTTTCGCAT | 6461 | ELDHLSH | 8128 | 103.714 |
| 1483 | ACACAAGCAGGTCTTGCGTCA | 6462 | TQAGLAS | 8129 | 103.696 |
| 1484 | GCGGCTCAGCATCATGATACG | 6463 | AAQHHDT | 8130 | 103.693 |
| 1485 | GGCGGCGCACACACTCGTGTA | 6464 | GGAHTRV | 8131 | 103.676 |
| 1486 | GCCTACGGTATACACGAAGTG | 6465 | AYGIHEV | 8132 | 103.653 |
| 1487 | GCGATGCTGCGTATGGAGCAG | 6466 | AMLRMEQ | 8133 | 103.652 |
| 1488 | ACGGATCGTTCGCGGCTGGGG | 6467 | TDRSRLG | 8134 | 103.622 |
| 1489 | GAGAGGGAGCCTCCTAAGAAT | 6468 | EREPPKN | 8135 | 103.621 |
| 1490 | GTTGTTAAGGAGATTAAGCTG | 6469 | VVKEIKL | 8136 | 103.6125 |
| 1491 | CACACCGGCCAAACACCATCA | 6470 | HTGQTPS | 8137 | 103.5945 |
| 1492 | GTGTCTCTGAGTTCGCCTCCG | 6471 | VSLSSPP | 8138 | 103.563 |
| 1493 | GGGGCAGGAAACCTGGGTACC | 6472 | GAGNLGT | 8139 | 103.5615 |
| 1494 | GCACGAGACGACACGATACAA | 6473 | ARDDTIQ | 8140 | 103.523 |
| 1495 | GGGACTTATACTAATATGCCG | 6474 | GTYTNMP | 8141 | 103.522 |
| 1496 | ATGCTGGGGGGTTTTGCGCAG | 6475 | MLGGFAQ | 8142 | 103.5051 |
| 1497 | CCATCCGAAATGAGGGCCGTA | 6476 | PSEMRAV | 8143 | 103.503 |
| 1498 | CGTATAAGCCCAGAAAACTCA | 6477 | RISPENS | 8144 | 103.497 |
| 1499 | AAGATGGGTGGTTCTCAGAGT | 6478 | KMGGSQS | 8145 | 103.477 |
| 1500 | GGTTTGATGGCGCATGTGACT | 6479 | GLMAHVT | 8146 | 103.464 |
| 1501 | TCACGTCAAACAGCGCTAACA | 6480 | SRQTALT | 8147 | 103.4599 |
| 1502 | AGTGATCTGAATCTTCCGCCG | 6481 | SDLNLPP | 8148 | 103.455 |
| 1503 | TATGTGTCTGATTATTTGCAT | 6482 | YVSDYLH | 8149 | 103.393 |
| 1504 | ACTAATGATAATAGTGATCGT | 6483 | TNDNSDR | 8150 | 103.374 |
| 1505 | TACTTAATGCACGACAGCGCA | 6484 | YLMHDSA | 8151 | 103.369 |
| 1506 | GGCTCTCGGAACGGACCCACA | 6485 | GSRNGPT | 8152 | 103.3096 |
| 1507 | AAAAACGGTGTTATAAACGAC | 6486 | KNGVIND | 8153 | 103.292 |
| 1508 | GAGTCTGTTGCTAATCTTAAG | 6487 | ESVANLK | 8154 | 103.162 |
| 1509 | GCATCGGACTCGACGACACCA | 6488 | ASDSTTP | 8155 | 103.149 |
| 1510 | CTGAACGTTAGTTCATCCAAA | 6489 | LNVSSSK | 8156 | 103.149 |
| 1511 | GAGGCTAAGGGTTTTGGTCAT | 6490 | EAKGFGH | 8157 | 103.1228 |
| 1512 | GGTACGAGTGCGGAGAGTCGG | 6491 | GTSAESR | 8158 | 103.111 |
| 1513 | ATGCACAACCTACCCTCATAC | 6492 | MHNLPSY | 8159 | 103.10145 |
| 1514 | GTCTTCACAGAAATAGAATCG | 6493 | VFTEIES | 8160 | 103.101 |
| 1515 | ACTCAAACTTCTACCTGGACC | 6494 | TQTSTWT | 8161 | 103.094 |
| 1516 | CCTATGAATAAGGATATTTTG | 6495 | PMNKDIL | 8162 | 103.07 |
| 1517 | AAAGAATCTGAATACAGAGTT | 6496 | KESEYRV | 8163 | 103.07 |
| 1518 | TCGACGAATTCTGAGGCGGTT | 6497 | STNSEAV | 8164 | 103.068 |
| 1519 | GATACGGCGAATCGTTCGACT | 6498 | DTANRST | 8165 | 103.03715 |
| 1520 | CCTAAGGCTCCGCTTAATAAT | 6499 | PKAPLNN | 8166 | 103.032 |
| 1521 | TTAGCTACATACCCCTCCCAC | 6500 | LATYPSH | 8167 | 103.028 |
| 1522 | GCTACGGTTCAGTCGGTTGAT | 6501 | ATVQSVD | 8168 | 103.011 |
| 1523 | AATTCGATGGGTAATGGGGGT | 6502 | NSMGNGG | 8169 | 103.009 |
| 1524 | GATCATAGTGAGCAGAATTCG | 6503 | DHSEQNS | 8170 | 102.995 |
| 1525 | ACTTTTTTGCCTCAGCTTGGG | 6504 | TFLPQLG | 8171 | 102.994 |
| 1526 | GGGTTTACTAATACGAGTAAG | 6505 | GFTNTSK | 8172 | 102.9895 |
| 1527 | ACGATGAATTATAGTCATACT | 6506 | TMNYSHT | 8173 | 102.962 |
| 1528 | AGTATCGGATTCTCAGTAGGC | 6507 | SIGFSVG | 8174 | 102.9565 |
| 1529 | AGTGAGAATCGGGCTGGTAAT | 6508 | SENRAGN | 8175 | 102.945 |
| 1530 | AGTCTTAATCTGCATAGTGTG | 6509 | SLNLHSV | 8176 | 102.93 |
| 1531 | CATGAGAGTCATTATGTTAGT | 6510 | HESHYVS | 8177 | 102.921 |
| 1532 | AATGTTGTTAATGGGATGGAT | 6511 | NVVNGMD | 8178 | 102.908 |
| 1533 | CACTCCGACAAAGTCTCCTCA | 6512 | HSDKVSS | 8179 | 102.8992 |
| 1534 | AAATCTGTAGGCGACGGGAGA | 6513 | KSVGDGR | 8180 | 102.8979 |
| 1535 | AGGCAGGTTGAGCAGTCTGAT | 6514 | RQVEQSD | 8181 | 102.889 |
| 1536 | AGGGAGCTGGTGAATACGGAT | 6515 | RELVNTD | 8182 | 102.87 |
| 1537 | AACTACAGGGACATCACAATG | 6516 | NYRDITM | 8183 | 102.8605 |
| 1538 | GCCAGCCTTGACCGCCTTCCA | 6517 | ASLDRLP | 8184 | 102.857 |
| 1539 | AGACAACTTGCTTCTCTCCCA | 6518 | RQLASLP | 8185 | 102.846 |
| 1540 | GTCAGCAAAACCAAAGACTCG | 6519 | VSKTKDS | 8186 | 102.832 |
| 1541 | AACGTATACGAAGGGCACCGC | 6520 | NVYEGHR | 8187 | 102.815 |
| 1542 | CTAGAACAACTACGGGTCCCA | 6521 | LEQLRVP | 8188 | 102.815 |
| 1543 | ATGACCTACACATCCCCAACC | 6522 | MTYTSPT | 8189 | 102.807 |
| 1544 | AACTCCCACACCGACAGAGGA | 6523 | NSHTDRG | 8190 | 102.801 |
| 1545 | GTGGCTGGGGGGACTTCGGAG | 6524 | VAGGTSE | 8191 | 102.789 |
| 1546 | GTCGACGCACACAGGGCTAAC | 6525 | VDAHRAN | 8192 | 102.77 |
| 1547 | CGGGCAGACATGACTCCCTTA | 6526 | RADMIPL | 8193 | 102.77 |
| 1548 | GGACACGAACAAACTGACGCA | 6527 | GHEQTDA | 8194 | 102.764 |
| 1549 | TACATCGCGGGAGGCGACCAA | 6528 | YIAGGDQ | 8195 | 102.75 |
| 1550 | TACGGCGACCTAACTACAGTC | 6529 | YGDLTTV | 8196 | 102.737 |
| 1551 | AGATTAGACCTGCAAGAACAC | 6530 | RLDLQEH | 8197 | 102.719 |
| 1552 | CACCTTAACCCGGCGGCCCAA | 6531 | HLNPAAQ | 8198 | 102.719 |
| 1553 | GGGGTTAACGAACAAACAAAC | 6532 | GVNEQTN | 8199 | 102.703 |
| 1554 | CGTCGGTTGAGTACGGATCTT | 6533 | RRLSTDL | 8200 | 102.702 |
| 1555 | GGATCCACAGGCCTACCCCCG | 6534 | GSTGLPP | 8201 | 102.7015 |
| 1556 | GACGACATGGTCAAAAACTCA | 6535 | DDMVKNS | 8202 | 102.6815 |
| 1557 | GTTATAGACCTAGTCACTCGC | 6536 | VIDLVTR | 8203 | 102.673 |
| 1558 | GGAGGCCTTACCAACGGTCTA | 6537 | GGLTNGL | 8204 | 102.67 |
| 1559 | CGTATGGAGGAGACTGCTTAT | 6538 | RMEETAY | 8205 | 102.6535 |
| 1560 | ACCGACATCTCCGGTTACGGA | 6539 | TDISGYG | 8206 | 102.642 |
| 1561 | CAGGTTAATCATAATACTAGT | 6540 | QVNHNTS | 8207 | 102.637 |
| 1562 | GCGACTACTGAGGATGTTCGT | 6541 | ATTEDVR | 8208 | 102.626 |
| 1563 | TGGAGCATCAAAAACCAAACA | 6542 | WSIKNQT | 8209 | 102.586 |
| 1564 | TCCCCTACCAGCAACACAATA | 6543 | SPTSNTI | 8210 | 102.584 |
| 1565 | ATGAAAAACTCTGGATTCGAC | 6544 | MKNSGFD | 8211 | 102.583 |
| 1566 | CTTGTTGCTGAGCGTTTGCCG | 6545 | LVAERLP | 8212 | 102.552 |
| 1567 | GGTGAAACTAACTTCCCAACT | 6546 | GETNFPT | 8213 | 102.532 |
| 1568 | AATGGTAAGCTGGGTACGACT | 6547 | NGKLGTT | 8214 | 102.52735 |
| 1569 | AACTTAGTAGCGTACACGAAA | 6548 | NLVAYTK | 8215 | 102.5245 |
| 1570 | TGGCAGCTTACGACGAGTCAT | 6549 | WQLTTSH | 8216 | 102.497 |
| 1571 | AGTTTGGACCTAGGAGGCAAC | 6550 | SLDLGGN | 8217 | 102.491 |
| 1572 | AACGAAAGCACCAAAGAATCT | 6551 | NESTKES | 8218 | 102.483 |
| 1573 | GGTTTTGATGGTAAGCAGCTT | 6552 | GFDGKQL | 8219 | 102.462 |
| 1574 | CATCTGTATATTTCGGCGGAT | 6553 | HLYISAD | 8220 | 102.442 |
| 1575 | TTACTTCCAAACAACACCCAC | 6554 | LLPNNTH | 8221 | 102.424 |
| 1576 | TCCGGAATGGCCGGCCTTTCC | 6555 | SGMAGLS | 8222 | 102.423 |
| 1577 | ATCACCTCACTCCCCGAAACC | 6556 | ITSLPET | 8223 | 102.414 |
| 1578 | GAGCTTAAGGAGAGTCAGAAG | 6557 | ELKESQK | 8224 | 102.408 |
| 1579 | AATATTGTGCAGGATTATCCG | 6558 | NFVQDYP | 8225 | 102.404 |
| 1580 | TCAGAAAACACCTCTGTACCC | 6559 | SENTSVP | 8226 | 102.388 |
| 1581 | GACCCCAACCAACCCAAAACA | 6560 | DPNQPKT | 8227 | 102.376 |
| 1582 | GCGGGTTTGGATGTGAATACG | 6561 | AGLDVNT | 8228 | 102.372 |
| 1583 | TCTCATGAGATGAATAATGGT | 6562 | SHEMNNG | 8229 | 102.366 |
| 1584 | TCTTACGCCATAAACCAATCA | 6563 | SYAINQS | 8230 | 102.335 |
| 1585 | GGTCATCTGCCTGCGGCTAAG | 6564 | GHLPAAK | 8231 | 102.315 |
| 1586 | GAGTTGGGTAATAAGACGGCT | 6565 | ELGNKTA | 8232 | 102.311 |
| 1587 | CTTGAGTCTACTCGTAAGGCT | 6566 | LESTRKA | 8233 | 102.31 |
| 1588 | ACTCAAGGCAACTCTGAAGCA | 6567 | TQGNSEA | 8234 | 102.31 |
| 1589 | ATCTCTATAGACTCCGCTATG | 6568 | ISIDSAM | 8235 | 102.301 |
| 1590 | GAGTTTCAGAGGATTCGTGAG | 6569 | EFQRIRE | 8236 | 102.259 |
| 1591 | GCTAGTCTCTCCGCACCAGCC | 6570 | ASLSAPA | 8237 | 102.227 |
| 1592 | GACAGCCAAATCACAAGACTA | 6571 | DSQITRL | 8238 | 102.218 |
| 1593 | GGCCACGAAAACATGGGCGTG | 6572 | GHENMGV | 8239 | 102.215 |
| 1594 | ATGTCGGCGGGGCATCCTACG | 6573 | MSAGHPT | 8240 | 102.207 |
| 1595 | CACGCTCCAAGCGGCGCCATA | 6574 | HAPSGAI | 8241 | 102.2 |
| 1596 | ACGACTATTACTAATTCGGTT | 6575 | TTITNSV | 8242 | 102.187 |
| 1597 | CCTCAGCATCAGCATGAGCAT | 6576 | PQHQHEH | 8243 | 102.1805 |
| 1598 | CAATACTCGATGGACACGCGC | 6577 | QYSMDTR | 8244 | 102.173 |
| 1599 | CTTTATGAGGTTGGTACTCCT | 6578 | LYEVGTP | 8245 | 102.165 |
| 1600 | GGTGAGACTATGCGTCATAAT | 6579 | GETMRHN | 8246 | 102.119 |
| 1601 | ATGACAATAACCGTCGAACCG | 6580 | MTITVEP | 8247 | 102.096 |
| 1602 | GCGCAGCATCCTGAGCGTTCG | 6581 | AQHPERS | 8248 | 102.084 |
| 1603 | ACGCATGTTGCTAAGCCTGAT | 6582 | THVAKPD | 8249 | 102.082 |
| 1604 | ATGACTGCTAACTTGGTGGAA | 6583 | MTANLVE | 8250 | 102.076 |
| 1605 | AATAGGCAGCGGGATTTTGAG | 6584 | NRQRDFE | 8251 | 102.073 |
| 1606 | TCAAACAGCGCCGACGCGGGG | 6585 | SNSADAG | 8252 | 102.047 |
| 1607 | GGTGAGTATGGTGCGTCGGTT | 6586 | GEYGASV | 8253 | 102.037 |
| 1608 | GACGGCATGGTCAGGTCGACA | 6587 | DGMVRST | 8254 | 102.025 |
| 1609 | AATGGTCAGCTGCTGGCTAAT | 6588 | NGQLLAN | 8255 | 102.023 |
| 1610 | TCCGCGGGGATGACATTGGAC | 6589 | SAGMTLD | 8256 | 102.016 |
| 1611 | GATCATGTGCATCTGACTTAT | 6590 | DHVHLTY | 8257 | 102.008 |
| 1612 | ACGACACTAACGCAAACGGAC | 6591 | TTLTQTD | 8258 | 102.003 |
| 1613 | GTGCAGTTGGCTGATGGGCAT | 6592 | VQLADGH | 8259 | 102.003 |
| 1614 | ACTGACTCATCTGCAGACTCC | 6593 | TDSSADS | 8260 | 101.981 |
| 1615 | GCGATGAATGTGCGGAGTGAT | 6594 | AMNVRSD | 8261 | 101.9805 |
| 1616 | GGTGATATTTCTTATAGGGTT | 6595 | GDISYRV | 8262 | 101.977 |
| 1617 | ATGGGGTATGTTGATAGTCTG | 6596 | MGYVDSL | 8263 | 101.953 |
| 1618 | CTTTATTTGGCGGCGGCTTCG | 6597 | LYLAAAS | 8264 | 101.948 |
| 1619 | TCATCCCCAGACTCGTACAGA | 6598 | SSPDSYR | 8265 | 101.921 |
| 1620 | AGTTATAATGTGGATCTGCAT | 6599 | SYNVDLH | 8266 | 101.892 |
| 1621 | CAACACACCGCCCACCCCATG | 6600 | QHTAHPM | 8267 | 101.892 |
| 1622 | GCAGTTATGGCTACACACCCC | 6601 | AVMATHP | 8268 | 101.87 |
| 1623 | ATTAGTCCGAGTGCTTCTAAT | 6602 | ISPSASN | 8269 | 101.855 |
| 1624 | ACTTTGGATAATAATCATTCT | 6603 | TLDNNHS | 8270 | 101.833 |
| 1625 | AGTGGGTCTTATGTGGCGACG | 6604 | SGSYVAT | 8271 | 101.806 |
| 1626 | ATGGCGGCTCCGCCGGAGCAT | 6605 | MAAPPEH | 8272 | 101.802 |
| 1627 | CAGACTGCGTCTGGTGATACT | 6606 | QTASGDT | 8273 | 101.7725 |
| 1628 | GAGTCTAAGACTGTGGTTATT | 6607 | ESKTWI | 8274 | 101.7695 |
| 1629 | ACGGTATTACCACAATCAGAC | 6608 | TVLPQSD | 8275 | 101.744 |
| 1630 | CCATTAAACGCGAACGGCTCC | 6609 | PLNANGS | 8276 | 101.7415 |
| 1631 | CCCCTGAACACAGGATTAACC | 6610 | PLNTGLT | 8277 | 101.718 |
| 1632 | GCCATAACGATAATAGGCACT | 6611 | AITIIGT | 8278 | 101.711 |
| 1633 | AATCCTAGTGCGATTAGTTAT | 6612 | NPSAISY | 8279 | 101.687 |
| 1634 | ACAGAACACGAAAAATCCACT | 6613 | TEHEKST | 8280 | 101.66205 |
| 1635 | GCTGAGAGTCAGCTGGCGTCG | 6614 | AESQLAS | 8281 | 101.655 |
| 1636 | GTGCTTAAGGGTACGTTTCCG | 6615 | VLKGTFP | 8282 | 101.652 |
| 1637 | TCGTTCGCCGAAATAACGACT | 6616 | SFAEITT | 8283 | 101.651 |
| 1638 | CCGTTAAACGGCCGCGTAACC | 6617 | PLNGRVT | 8284 | 101.642 |
| 1639 | TCCGAACGCCCCCAATCGTCA | 6618 | SERPQSS | 8285 | 101.579 |
| 1640 | GCTCAGCTTCAGGATTCGGTG | 6619 | AQLQDSV | 8286 | 101.568 |
| 1641 | CCCAACCGTGTAACAGCACCC | 6620 | PNRVTAP | 8287 | 101.5542 |
| 1642 | GCGCTTATTGTTTCGAGTATG | 6621 | ALIVSSM | 8288 | 101.54 |
| 1643 | GCGCATGGTGCTTTTCCGGTT | 6622 | AHGAFPV | 8289 | 101.495 |
| 1644 | GAGGCTTATCAGACTGAGAAG | 6623 | EAYQTEK | 8290 | 101.49 |
| 1645 | GCTGCGGCTTCGCCTTTGGCT | 6624 | AAASPLA | 8291 | 101.484 |
| 1646 | CCCCAAGCCACTCTCAACAAC | 6625 | PQATLNN | 8292 | 101.432 |
| 1647 | ACGAGGGGTGATATGGAGTTT | 6626 | TRGDMEF | 8293 | 101.424 |
| 1648 | AGCAACCTAGGCGAAGCATCT | 6627 | SNLGEAS | 8294 | 101.423 |
| 1649 | GGAATCACCGGAAGCCCCGGC | 6628 | GITGSPG | 8295 | 101.42 |
| 1650 | GGGTTTGAGACGAGTAGTCCT | 6629 | GFETSSP | 8296 | 101.369 |
| 1651 | CCCGCGAGAAGCGACGCCCTT | 6630 | PARSDAL | 8297 | 101.359 |
| 1652 | CATGCTAATTATGTTGAGGTG | 6631 | HANYVEV | 8298 | 101.345 |
| 1653 | GTGACTCGTAGTACGAAGGAG | 6632 | VTRSTKE | 8299 | 101.32381 |
| 1654 | GATGTTGCGTTGAGGTCGAAT | 6633 | DVALRSN | 8300 | 101.254 |
| 1655 | GAGTCTGATTTGCGTCAGCGG | 6634 | ESDLRQR | 8301 | 101.225 |
| 1656 | CCGTTACTCGCAGCGAACCCG | 6635 | PLLAANP | 8302 | 101.207 |
| 1657 | ATAAACGCCGCGCACAGGCCC | 6636 | INAAHRP | 8303 | 101.163 |
| 1658 | GCTCGGAGAGACGTAAACTCG | 6637 | ARRDVNS | 8304 | 101.15 |
| 1659 | AGTATGGATAAGGTGGAGAAG | 6638 | SMDKVEK | 8305 | 101.144 |
| 1660 | AACGTCAGCGCACGGGAAACA | 6639 | NVSARET | 8306 | 101.113 |
| 1661 | CTGACGACGGCTGGTATGTGG | 6640 | LTTAGMW | 8307 | 100.9605 |
| 1662 | GCGCGGGCAGAAGGGGTCTTC | 6641 | ARAEGVF | 8308 | 100.9325 |
| 1663 | CCGAGTGATCATATGCGGACT | 6642 | PSDHMRT | 8309 | 100.8849 |
| 1664 | AGTAGGACGGTTATTTTGTCG | 6643 | SRTVILS | 8310 | 100.8697 |
| 1665 | CAGAGTAATGCTGCTGAGGGT | 6644 | QSNAAEG | 8311 | 100.8152 |
| 1666 | TGGACCGAAACGGCCGCTCAC | 6645 | WTETAAH | 8312 | 100.7753 |
| 1667 | AAGGAGAATCAGCTTAGTAAG | 6646 | KENQLSK | 8313 | 100.7556 |

TABLE 4
CK8 promoter

| Rank | Sequence | SEQ ID NO: |
|---|---|---|
| 1 | RGDLSTP | 13 |
| 2 | RGDLNQY | 14 |
| 3 | RGDLTTP | 15 |
| 4 | RGDATEL | 16 |
| 5 | RGDQLYH | 17 |
| 6 | RGDLSTP | 18 |
| 7 | RGDVAAK | 19 |
| 8 | RGDLTTP | 20 |
| 9 | RGDLNQY | 21 |
| 10 | RGDTMSK | 22 |
| 11 | RGDVAAK | 23 |
| 12 | RGDTMSK | 24 |
| 13 | RGDATEL | 25 |

TABLE 5
MHCK7 promoter

| Rank | Sequence | SEQ ID NO: |
|---|---|---|
| 1 | RGDLTTP | 26 |
| 2 | RGDLNQY | 27 |
| 3 | RGDLSTP | 28 |
| 4 | RGDQLYH | 29 |
| 5 | RGDTMSK | 30 |
| 6 | RGDATEL | 31 |
| 7 | RGDLSTP | 32 |
| 8 | RGDMINT | 33 |
| 9 | RGDLNQY | 34 |
| 10 | RGDTMSK | 35 |
| 11 | RGDLTTP | 36 |
| 12 | RGDLNDS | 37 |

TABLE 6
MHCK7 and CK8 combined.

| Rank | Sequence | SEQ ID NO: |
|---|---|---|
| 1 | RGDLSTP | 38 |
| 2 | RGDLSTP | 39 |
| 3 | RGDLTTP | 40 |
| 4 | RGDLNQY | 41 |
| 5 | RGDQLYH | 41 |
| 6 | RGDATEL | 43 |
| 7 | RGDTMSK | 44 |
| 8 | RGDLNQY | 45 |
| 9 | RGDLTTP | 46 |
| 10 | RGDMINT | 47 |
| 11 | RGDTMSK | 48 |
| 12 | RGDTMNY | 49 |
| 13 | RGDATEL | 50 |

[0148] Also described herein are polynucleotides that encode the engineered AAV capsid described herein. In some embodiments, the engineered AAV capsid encoding polynucleotide can be included in a polynucleotide that is configured to be an AAV genome donor in an AAV vector system that can be used to generate engineered AAV particles described elsewhere herein. In some embodiments the engineered AAV capsid encoding polynucleotide can be operably coupled to a poly adenylation tail. In some embodiments, the poly adenylation tail can be an SV40 poly adenylation tail. In some embodiments, the AAV capsid encoding polynucleotide can be operably coupled to a promoter. In some embodiments, the promoter can be a tissue specific promoter. In some embodiments, the tissue specific promoter is specific for muscle (e.g. cardiac, skeletal, and/or smooth muscle), neurons and supporting cells (e.g. astrocytes, glial cells, Schwann cells, etc.), fat, spleen, liver, kidney, immune cells, spinal fluid cells, synovial fluid cells, skin cells, cartilage, tendons, connective tissue, bone, pancreas, adrenal gland, blood cell, bone marrow cells, placenta, endothelial cells, and combinations thereof. In some embodiments the promoter can be a constitutive promoter. Suitable tissue specific promoters and constitutive promoters are discussed elsewhere herein and are generally known in the art and can be commercially available.

[0149] Suitable muscle specific promoters include, but are not limited to CK8, MHCK7, Myoglobin promoter (Mb), Desmin promoter, muscle creatine kinase promoter (MCK) and variants thereof, and SPc5-12 synthetic promoter.

[0150] Suitable immune cell specific promoters include, but are not limited to, B29 promoter (B cells), CD14 promoter (monocytic cells), CD43 promoter (leukocytes and platelets), CD68 (macrophages), and SV40/CD43 promoter (leukocytes and platelets).

[0151] Suitable blood cell specific promoters include, but are not limited to, CD43 promoter (leukocytes and platelets), CD45 promoter (hematopoietic cells), INF-beta (hematopoietic cells), WASP promoter (hematopoietic cells), SV40/CD43 promoter (leukocytes and platelets), and SV40/CD45 promoter (hematopoietic cells).

[0152] Suitable pancreatic specific promoters include, but are not limited to, the Elastase-1 promoter.

[0153] Suitable endothelial cell specific promoters include, but are not limited to, Fit-1 promoter and ICAM-2 promoter.

[0154] Suitable neuronal tissue/cell specific promoters include, but are not limited to, GFAP promoter (astrocytes), SYN1 promoter (neurons), and NSE/RU5′ (mature neurons).

[0155] Suitable kidney specific promoters include, but are not limited to, NphsI promoter (podocytes).

[0156] Suitable bone specific promoters include, but are not limited to, OG-2 promoter (osteoblasts, odontoblasts).

[0157] Suitable lung specific promoters include, but are not limited to, SP-B prompter (lung).

[0158] Suitable liver specific promoters include, but are not limited to SV40/Alb promoter. Suitable heart specific promoters can include, but are not limited to, alpha-MHC.

[0159] Suitable constitutive promoters include, but are not limited to CMV, RSV, SV40, EF1alpha, CAG, and beta-actin.

### Methods of Generating Engineered AAV Capsids

[0160] Also provided herein are methods of generating engineered AAV capsids. The engineered AAV capsid variants can be variants of wild-type AAV capsids. FIGS. 6-8 can illustrate various embodiments of methods capable of generating engineered AAV capsids described herein. Generally, an AAV capsid library can be generated by expressing engineered capsid vectors each containing an engineered AAV capsid polynucleotide previously described in an appropriate AAV producer cell line. See e.g. FIG. 8. It will be appreciated that although FIG. 8 shows a helper-dependent method of AAV particle production, it will be appreciated that this can be done via a helper-free method as well. This can generate an AAV capsid library that can contain one more desired cell-specific engineered AAV capsid variant. As shown in FIG. 6 the AAV capsid library can be administered to various non-human animals for a first round of mRNA-based selection. As shown in FIG. 1, the transduction process by AAVs and related vectors can result in the production of an mRNA molecule that is reflective of the genome of the virus that transduced the cell. As is at least demonstrated in the Examples herein, mRNA based-selection can be more specific and effective to determine a virus particle capable of functionally transducing a cell because it is based on the functional product produced as opposed to just detecting the presence of a virus particle in the cell by measuring the presence of viral DNA.

[0161] After first-round administration, one or more engineered AAV virus particles having a desired capsid variant can then be used to form a filtered AAV capsid library. Desirable AAV virus particles can be identified by measuring the mRNA expression of the capsid variants and determining which variants are highly expressed in the desired cell type(s) as compared to non-desired cells type(s). Those that are highly expressed in the desired cell, tissue, and/or organ type are the desired AAV capsid variant particles. In some embodiments, the AAV capsid variant encoding polynucleotide is under control of a tissue-specific promoter that has selective activity in the desired cell, tissue, or organ.

[0162] The engineered AAV capsid variant particles identified from the first round can then be administered to various non-human animals. In some embodiments, the animals used in the second round of selection and identification are not the same as those animals used for first round selection and identification. Similar to round 1, after administration the top expressing variants in the desired cell, tissue, and/or organ type(s) can be identified by measuring viral mRNA expression in the cells. The top variants identified after round two can then be optionally barcoded and optionally pooled. In some embodiments, top variants from the second round can then be administered to a non-human primate to identify the top cell-specific variant(s), particularly if the end use for the top variant is in humans. Administration at each round can be systemic.

[0163] In some embodiments, the method of generating an AAV capsid variant can include the steps of: (a) expressing a vector system described herein that contains an engineered AAV capsid polynucleotide in a cell to produce engineered AAV virus particle capsid variants; (b) harvesting the engineered AAV virus particle capsid variants produced in step (a); (c) administering engineered AAV virus particle capsid variants to one or more first subjects, wherein the engineered AAV virus particle capsid variants are produced by expressing an engineered AAV capsid variant vector or system thereof in a cell and harvesting the engineered AAV virus particle capsid variants produced by the cell; and (d) identifying one or more engineered AAV capsid variants produced at a significantly high level by one or more specific cells or specific cell types in the one or more first subjects. In this context, “significantly high” can refer to a titer that can range from between about 2×10¹¹ to about 6×10¹² vector genomes per 15 cm dish.

[0164] The method can further include the steps of: (e) administering some or all engineered AAV virus particle capsid variants identified in step (d) to one or more second subjects; and (f) identifying one or more engineered AAV virus particle capsid variants produced at a significantly high level in one or more specific cells or specific cell types in the one or more second subjects. The cell in step (a) can be a prokaryotic cell or a eukaryotic cell. In some embodiments, the administration in step (c), step (e), or both is systemic. In some embodiments, one or more first subjects, one or more second subjects, or both, are non-human mammals. In some embodiments, one or more first subjects, one or more second subjects, or both, are each independently selected from the group consisting of: a wild-type non-human mammal, a humanized non-human mammal, a disease-specific non-human mammal model, and a non-human primate.

### Engineered Vectors and Vector Systems

[0165] Also provided herein are vectors and vector systems that can contain one or more of the engineered AAV capsid polynucleotides described herein. In some embodiments, one or more of the vector systems are suitable to generate and/or identify cell-specific n-mer motifs and/or capsids as previously described. In some embodiments, one or more of the vectors and vector systems described herein are suitable for production of engineered virus particles containing a capsid protein containing an n-mer motif and optionally a cargo that can be used to deliver a cargo to a subject for, by way of example, treatment.

[0166] As used in this context, engineered AAV capsid polynucleotides refers to any one or more of the polynucleotides described herein capable of encoding an engineered AAV capsid as described elsewhere herein and/or polynucleotide(s) capable of encoding one or more engineered AAV capsid proteins described elsewhere herein. Further, where the vector includes an engineered AAV capsid polynucleotide described herein, the vector can also be referred to and considered an engineered vector or system thereof although not specifically noted as such. In embodiments, the vector can contain one or more polynucleotides encoding one or more elements of an engineered AAV capsid described herein. The vectors can be useful in producing bacterial, fungal, yeast, plant cells, animal cells, and transgenic animals that can express one or more components of the engineered AAV capsid described herein. Within the scope of this disclosure are vectors containing one or more of the polynucleotide sequences described herein. One or more of the polynucleotides that are part of the engineered AAV capsid and system thereof described herein can be included in a vector or vector system.

[0167] In some embodiments, the vector can include an engineered AAV capsid polynucleotide having a 3′ polyadenylation signal. In some embodiments, 3′ polyadenylation is an SV40 polyadenylation signal. In some embodiments the vector does not have splice regulatory elements. In some embodiments, the vector includes one or more minimal splice regulatory elements. In some embodiments, the vector can further include a modified splice regulatory element, wherein the modification inactivates the splice regulatory element. In some embodiments, the modified splice regulatory element is a polynucleotide sequence sufficient to induce splicing, between a rep protein polynucleotide and the engineered AAV capsid protein variant polynucleotide. In some embodiments, the polynucleotide sequence can be sufficient to induce splicing is a splice acceptor or a splice donor. In some embodiments, the AAV capsid polynucleotide is an engineered AAV capsid polynucleotide as described elsewhere herein.

[0168] In some embodiments, the vectors and vector systems suitable for generating and/or identifying cell-specific n-mer motifs and capsid proteins contain an adeno-associated (AAV) capsid protein polynucleotide, wherein the AAV capsid protein polynucleotide comprises a 3′ polyadenylation signal. In certain example embodiments, the vector does not comprise splice regulatory elements. In certain example embodiments, the vector comprises minimal splice regulatory elements. In certain example embodiments, the vector further comprises a modified splice regulatory element, wherein the modification inactivates the splice regulatory element. In certain example embodiments, the modified splice regulatory element is a polynucleotide sequence sufficient to induce splicing, between a rep protein polynucleotide and the capsid protein polynucleotide. In certain example embodiments, the polynucleotide sequence sufficient to induce splicing is a splice acceptor or a splice donor. In certain example embodiments, the polyadenylation signal is an SV40 polyadenylation signal. In certain example embodiments, the AAV capsid polynucleotide is an engineered AAV capsid polynucleotide. In certain example embodiments, the engineered AAV capsid polynucleotide comprises a n-mer motif polynucleotide capable of encoding an n-mer amino acid motif, wherein the n-mer motif comprises three or more amino acids, wherein the n-mer motif polynucleotide is inserted between two codons in the AAV capsid polynucleotide within a region of the AAV capsid polynucleotide capable of encoding a capsid surface. In certain example embodiments, the n-mer motif comprises 3-15 amino acids. In certain example embodiments, the n-mer motif is 6 or 7 amino acids. In certain example embodiments, the n-mer motif polynucleotide is inserted between the codons corresponding to any two contiguous amino acids between amino acids 262-269, 327-332, 382-386, 452-460, 488-505, 527-539, 545-558, 581-593, 704-714, or any combination thereof in an AAV9 capsid polynucleotide or in an analogous position in an AAV2, AAV3, AAV4, AAV5, AAV6, AAV7, AAV8 capsid polynucleotide. In certain example embodiments, the n-mer motif polynucleotide is inserted between the codons corresponding to aa588 and 589 in the AAV9 capsid polynucleotide. In certain example embodiments, the vector is capable of producing AAV virus particles having increased specificity, reduced immunogenicity, or both. In certain example embodiments, the vector is capable of producing AAV virus particles having increased muscle cell, specificity, reduced immunogenicity, or both. In certain example embodiments, the n-mer motif polynucleotide is any polynucleotide in any of Tables 1-6. In certain example embodiments, the n-mer motif polynucleotide is capable of encoding a peptide as in any of Tables 1-6. In certain example embodiments, the n-mer motif polynucleotide is capable of encoding three or more amino acids, wherein the first three amino acids are RGD. In certain example embodiments, the n-mer motif has a polypeptide sequence of RGD or RGDXₙ, where nis 3-15 amino acids and X, where each amino acid present are independently selected from the others from the group of any amino acid. In certain example embodiments, the vector is capable of producing an AAV capsid polypeptide, AAV capsid, or both that have a muscle-specific tropism.

[0169] In some embodiments, a vector system that is capable of generating and/or identifying or useful in a method to generate or identify a cell-specific n-mer motif and/or capsid protein can include a vector as described in the prior paragraph and as further described elsewhere herein; an AAV rep protein polynucleotide or portion thereof; and a single promoter operably coupled to the AAV capsid protein, AAV rep protein, or both, wherein the single promoter is the only promoter operably coupled to the AAV capsid protein, AAV rep protein, or both.

[0170] In certain example embodiments herein, are vector systems comprising a vector as in e.g., any one as further described elsewhere herein; and an AAV rep protein polynucleotide or portion thereof.

[0171] In certain example embodiments, the vector system further comprises a first promoter, wherein the first promoter is operably coupled to the AAV capsid protein, AAV rep protein, or both. In certain example embodiments, the first promoter or the single promoter is a cell-specific promoter. In certain example embodiments, the first promoter or the single promoter is capable of driving high-titer viral production in the absence of an endogenous AAV promoter. In certain example embodiments, the endogenous AAV promoter is p40. In certain example embodiments, the AAV rep protein polynucleotide is operably coupled to the AAV capsid protein. In certain example embodiments, the AAV protein polynucleotide is part of the same vector as the AAV capsid protein polynucleotide. In certain example embodiments, the AAV protein polynucleotide is on a different vector as the AAV capsid protein polynucleotide.

[0172] In some embodiments, the vector or vector system can include a second promoter, which can be optionally coupled to AAV capsid protein, AAV rep protein, or both.

[0173] Described in example embodiments herein are polypeptides encoded by a vector of the present invention as further described elsewhere herein or by a vector system of the present invention as further described elsewhere herein.

[0174] Described in example embodiments herein are cells comprising: a vector of of the present invention as further described elsewhere herein, a vector system of and the present invention as further described elsewhere herein, a polypeptide of the present invention as further described elsewhere herein, or any combination thereof.

[0175] In certain example embodiments, the cell is prokaryotic.

[0176] In certain example embodiments, the cell is eukaryotic.

[0177] Described in certain example embodiments herein are engineered adeno-associated virus particles produced by the method comprising: expressing a vector of the present invention as further described elsewhere herein, a vector system of the present invention as further described elsewhere herein, or both in a cell. In certain example embodiments, the step of expressing the vector system occurs in vitro or ex vivo. In certain example embodiments, the step of expressing the vector system occurs in vivo.

[0178] The vectors and/or vector systems can be used, for example, to express one or more of the engineered AAV capsid polynucleotides in a cell, such as a producer cell, to produce engineered AAV particles containing an engineered AAV capsid described elsewhere herein. Other uses for the vectors and vector systems described herein are also within the scope of this disclosure. In general, and throughout this specification, the term is a tool that allows or facilitates the transfer of an entity from one environment to another. In some contexts, which will be appreciated by those of ordinary skill in the art, “vector” can be a term of art to refer to a nucleic acid molecule capable of transporting another nucleic acid to which it has been linked. A vector can be a replicon, such as a plasmid, phage, or cosmid, into which another DNA segment may be inserted so as to bring about the replication of the inserted segment. Generally, a vector is capable of replication when associated with the proper control elements.

[0179] Vectors include, but are not limited to, nucleic acid molecules that are single-stranded, double-stranded, or partially double-stranded; nucleic acid molecules that comprise one or more free ends, no free ends (e.g. circular); nucleic acid molecules that comprise DNA, RNA, or both; and other varieties of polynucleotides known in the art. One type of vector is a “plasmid,” which refers to a circular double stranded DNA loop into which additional DNA segments can be inserted, such as by standard molecular cloning techniques. Another type of vector is a viral vector, wherein virally-derived DNA or RNA sequences are present in the vector for packaging into a virus (e.g. retroviruses, replication defective retroviruses, adenoviruses, replication defective adenoviruses, and adeno-associated viruses (AAVs)). Viral vectors also include polynucleotides carried by a virus for transfection into a host cell. Certain vectors are capable of autonomous replication in a host cell into which they are introduced (e.g. bacterial vectors having a bacterial origin of replication and episomal mammalian vectors). Other vectors (e.g., non-episomal mammalian vectors) are integrated into the genome of a host cell upon introduction into the host cell, and thereby are replicated along with the host genome. Moreover, certain vectors are capable of directing the expression of genes to which they are operatively-linked. Such vectors are referred to herein as “expression vectors.” Common expression vectors of utility in recombinant DNA techniques are often in the form of plasmids.

[0180] Recombinant expression vectors can be composed of a nucleic acid (e.g. a polynucleotide) of the invention in a form suitable for expression of the nucleic acid in a host cell, which means that the recombinant expression vectors include one or more regulatory elements, which can be selected on the basis of the host cells to be used for expression, that is operatively-linked to the nucleic acid sequence to be expressed. Within a recombinant expression vector, “operably linked” and “operatively-linked” are used interchangeably herein and further defined elsewhere herein. In the context of a vector, the term “operably linked” is intended to mean that the nucleotide sequence of interest is linked to the regulatory element(s) in a manner that allows for expression of the nucleotide sequence (e.g., in an in vitro transcription/translation system or in a host cell when the vector is introduced into the host cell). Advantageous vectors include adeno-associated viruses, and types of such vectors can also be selected for targeting particular types of cells, such as those engineered AAV vectors containing an engineered AAV capsid polynucleotide with a desired cell-specific tropism. These and other embodiments of the vectors and vector systems are described elsewhere herein.

[0181] In some embodiments, the vector can be a bicistronic vector. In some embodiments, a bicistronic vector can be used for one or more elements of the engineered AAV capsid system described herein. In some embodiments, expression of elements of the engineered AAV capsid system described herein can be driven by a suitable constitutive or tissue specific promoter. Where the element of the engineered AAV capsid system is an RNA, its expression can be driven by a Pol III promoter, such as a U6 promoter. In some embodiments, the two are combined.

### Cell-Based Vector Amplification and Expression

[0182] Vectors can be designed for expression of one or more elements of the engineered AAV capsid system described herein (e.g. nucleic acid transcripts, proteins, enzymes, and combinations thereof) in a suitable host cell. In some embodiments, the suitable host cell is a prokaryotic cell. Suitable host cells include, but are not limited to, bacterial cells, yeast cells, insect cells, and mammalian cells. The vectors can be viral-based or non-viral based. In some embodiments, the suitable host cell is a eukaryotic cell. In some embodiments, the suitable host cell is a suitable bacterial cell. Suitable bacterial cells include, but are not limited to, bacterial cells from the bacteria of the species Escherichia coli. Many suitable strains of E. coli are known in the art for expression of vectors. These include, but are not limited to Pir1, Stb12, Stb13, Stb14, TOP10, XL1 Blue, and XL10 Gold. In some embodiments, the host cell is a suitable insect cell. Suitable insect cells include those from Spodoptera frugiperda. Suitable strains of S. frugiperda cells include, but are not limited, to Sf9 and Sf21. In some embodiments, the host cell is a suitable yeast cell. In some embodiments, the yeast cell can be from Saccharomyces cerevisiae. In some embodiments, the host cell is a suitable mammalian cell. Many types of mammalian cells have been developed to express vectors. Suitable mammalian cells include, but are not limited to, HEK293, Chinese Hamster Ovary Cells (CHOs), mouse myeloma cells, HeLa, U2OS, A549, HT1080, CAD, P19, NIH 3T3, L929, N2a, MCF-7, Y79, SO-Rb50, HepG G2, DIKX-X11, J558L, Baby hamster kidney cells (BHK), and chicken embryo fibroblasts (CEFs). Suitable host cells are discussed further in Goeddel, GENE EXPRESSION TECHNOLOGY: METHODS IN ENZYMOLOGY 185, Academic Press, San Diego, Calif. (1990).

[0183] In some embodiments, the vector can be a yeast expression vector. Examples of vectors for expression in yeast Saccharomyces cerevisiae include pYepSec1 (Baldari, et al., 1987. EMBO J. 6:229-234), pMFa (Kuijan and Herskowitz, 1982. Cell 30:933-943), pJRY88 (Schultz et al., 1987. Gene 54:113-123), pYES2 (Invitrogen Corporation, San Diego, Calif.), and picZ (In Vitrogen Corp, San Diego, Calif.). As used herein, a “yeast expression vector” refers to a nucleic acid that contains one or more sequences encoding an RNA and/or polypeptide and may further contain any desired elements that control the expression of the nucleic acid(s), as well as any elements that enable the replication and maintenance of the expression vector inside the yeast cell. Many suitable yeast expression vectors and features thereof are known in the art; for example, various vectors and techniques are illustrated in in Yeast Protocols, 2nd edition, Xiao, W., ed. (Humana Press, New York, 2007) and Buckholz, R. G. and Gleeson, M. A. (1991) Biotechnology (NY) 9 (11): 1067-72. Yeast vectors can contain, without limitation, a centromeric (CEN) sequence, an autonomous replication sequence (ARS), a promoter, such as an RNA Polymerase III promoter, operably linked to a sequence or gene of interest, a terminator such as an RNA polymerase III terminator, an origin of replication, and a marker gene (e.g., auxotrophic, antibiotic, or other selectable markers). Examples of expression vectors for use in yeast may include plasmids, yeast artificial chromosomes, 2μ plasmids, yeast integrative plasmids, yeast replicative plasmids, shuttle vectors, and episomal plasmids.

[0184] In some embodiments, the vector is a baculovirus vector or expression vector and can be suitable for expression of polynucleotides and/or proteins in insect cells. Baculovirus vectors available for expression of proteins in cultured insect cells (e.g., SF9 cells) include the pAc series (Smith, et al., 1983. Mol. Cell. Biol. 3:2156-2165) and the pVL series (Lucklow and Summers, 1989. Virology 170:31-39). rAAV (recombinant Adeno-associated viral) vectors are preferably produced in insect cells, e.g., Spodoptera frugiperda Sf9 insect cells, grown in serum-free suspension culture. Serum-free insect cells can be purchased from commercial vendors, e.g., Sigma Aldrich (EX-CELL 405).

[0185] In some embodiments, the vector is a mammalian expression vector. In some embodiments, the mammalian expression vector is capable of expressing one or more polynucleotides and/or polypeptides in a mammalian cell. Examples of mammalian expression vectors include, but are not limited to, pCDM8 (Seed, 1987. Nature 329:840) and pMT2PC (Kaufman, et al., 1987. EMBO J. 6:187-195). The mammalian expression vector can include one or more suitable regulatory elements capable of controlling expression of the one or more polynucleotides and/or proteins in the mammalian cell. For example, commonly used promoters are derived from polyoma, adenovirus 2, cytomegalovirus, simian virus 40, and others disclosed herein and known in the art. More detail on suitable regulatory elements are described elsewhere herein.

[0186] For other suitable expression vectors and vector systems for both prokaryotic and eukaryotic cells see, e.g., Chapters 16 and 17 of Sambrook, et al., MOLECULAR CLONING: A LABORATORY MANUAL. 2nd ed., Cold Spring Harbor Laboratory, Cold Spring Harbor Laboratory Press, Cold Spring Harbor, N.Y., 1989.

[0187] In some embodiments, the recombinant mammalian expression vector is capable of directing expression of the nucleic acid preferentially in a particular cell type (e.g., tissue-specific regulatory elements are used to express the nucleic acid). Tissue-specific regulatory elements are known in the art. Non-limiting examples of suitable tissue-specific promoters include the albumin promoter (liver-specific; Pinkert, et al., 1987. Genes Dev. 1:268-277), lymphoid-specific promoters (Calame and Eaton, 1988. Adv. Immunol. 43:235-275), in particular promoters of T cell receptors (Winoto and Baltimore, 1989. EMBO) J. 8:729-733) and immunoglobulins (Baneiji, et al., 1983. Cell 33:729-740; Queen and Baltimore, 1983. Cell 33:741-748), neuron-specific promoters (e.g., the neurofilament promoter; Byrne and Ruddle, 1989. Proc. Natl. Acad. Sci. USA 86:5473-5477), pancreas-specific promoters (Edlund, et al., 1985. Science 230:912-916), and mammary gland-specific promoters (e.g., milk whey promoter; U.S. Pat. No. 4,873,316 and European Application Publication No. 264,166). Developmentally-regulated promoters are also encompassed, e.g., the murine hox promoters (Kessel and Gruss, 1990. Science 249:374-379) and the α-fetoprotein promoter (Campes and Tilghman, 1989. Genes Dev. 3:537-546). With regards to these prokaryotic and eukaryotic vectors, mention is made of U.S. Pat. No. 6,750,059, the contents of which are incorporated by reference herein in their entirety. Other embodiments can utilize viral vectors, with regards to which mention is made of U.S. patent application Ser. No. 13/092,085, the contents of which are incorporated by reference herein in their entirety. Tissue-specific regulatory elements are known in the art and in this regard, mention is made of U.S. Pat. No. 7,776,321, the contents of which are incorporated by reference herein in their entirety. In some embodiments, a regulatory element can be operably linked to one or more elements of an engineered AAV capsid system so as to drive expression of the one or more elements of the engineered AAV capsid system described herein.

[0188] Vectors may be introduced and propagated in a prokaryote or prokaryotic cell. In some embodiments, a prokaryote is used to amplify copies of a vector to be introduced into a eukaryotic cell or as an intermediate vector in the production of a vector to be introduced into a eukaryotic cell (e.g. amplifying a plasmid as part of a viral vector packaging system). In some embodiments, a prokaryote is used to amplify copies of a vector and express one or more nucleic acids, such as to provide a source of one or more proteins for delivery to a host cell or host organism.

[0189] In some embodiments, the vector can be a fusion vector or fusion expression vector. In some embodiments, fusion vectors add a number of amino acids to a protein encoded therein, such as to the amino terminus, carboxy terminus, or both of a recombinant protein. Such fusion vectors can serve one or more purposes, such as: (i) to increase expression of recombinant protein; (ii) to increase the solubility of the recombinant protein; and (iii) to aid in the purification of the recombinant protein by acting as a ligand in affinity purification. In some embodiments, expression of polynucleotides (such as non-coding polynucleotides) and proteins in prokaryotes can be carried out in Escherichia coli with vectors containing constitutive or inducible promoters directing the expression of either fusion or non-fusion polynucleotides and/or proteins. In some embodiments, the fusion expression vector can include a proteolytic cleavage site, which can be introduced at the junction of the fusion vector backbone or other fusion moiety and the recombinant polynucleotide or protein to enable separation of the recombinant polynucleotide or protein from the fusion vector backbone or other fusion moiety subsequent to purification of the fusion polynucleotide or protein. Such enzymes, and their cognate recognition sequences, include Factor Xa, thrombin and enterokinase. Example fusion expression vectors include pGEX (Pharmacia Biotech Inc; Smith and Johnson, 1988. Gene 67:31-40), pMAL (New England Biolabs, Beverly, Mass.) and pRIT5 (Pharmacia, Piscataway, N.J.) that fuse glutathione S-transferase (GST), maltose E binding protein, or protein A, respectively, to the target recombinant protein. Examples of suitable inducible non-fusion E. coli expression vectors include pTrc (Amrann et al., (1988) Gene 69:301-315) and pET 11d (Studier et al., GENE EXPRESSION TECHNOLOGY: METHODS IN ENZYMOLOGY 185, Academic Press, San Diego, Calif. (1990) 60-89).

[0190] In some embodiments, one or more vectors driving expression of one or more elements of an engineered AAV capsid system described herein are introduced into a host cell such that expression of the elements of the engineered delivery system described herein direct formation of an engineered AAV capsid system described herein (including but not limited to an engineered gene transfer agent particle, which is described in greater detail elsewhere herein). For example, different elements of the engineered AAV capsid system described herein can each be operably linked to separate regulatory elements on separate vectors. RNA(s) of different elements of the engineered delivery system described herein can be delivered to an animal or mammal or cell thereof to produce an animal or mammal or cell thereof that constitutively or inducibly or conditionally expresses different elements of the engineered AAV capsid system described herein that incorporates one or more elements of the engineered AAV capsid system described herein or contains one or more cells that incorporates and/or expresses one or more elements of the engineered AAV capsid system described herein.

[0191] In some embodiments, two or more of the elements expressed from the same or different regulatory element(s), can be combined in a single vector, with one or more additional vectors providing any components of the system not included in the first vector. Engineered AAV capsid system polynucleotides that are combined in a single vector may be arranged in any suitable orientation, such as one element located 5′ with respect to (“upstream” of) or 3′ with respect to (“downstream” of) a second element. The coding sequence of one element may be located on the same or opposite strand of the coding sequence of a second element, and oriented in the same or opposite direction. In some embodiments, a single promoter drives expression of a transcript encoding one or more engineered AAV capsid proteins, embedded within one or more intron sequences (e.g., each in a different intron, two or more in at least one intron, or all in a single intron). In some embodiments, the engineered AAV capsid polynucleotides can be operably linked to and expressed from the same promoter.

### Vector Features

[0192] The vectors can include additional features that can confer one or more functionalities to the vector, the polynucleotide to be delivered, a virus particle produced there from, or polypeptide expressed thereof. Such features include, but are not limited to, regulatory elements, selectable markers, molecular identifiers (e.g. molecular barcodes), stabilizing elements, and the like. It will be appreciated by those skilled in the art that the design of the expression vector and additional features included can depend on such factors as the choice of the host cell to be transformed, the level of expression desired, etc.

### Regulatory Elements

[0193] In embodiments, the polynucleotides and/or vectors thereof described herein (such as the engineered AAV capsid polynucleotides of the present invention) can include one or more regulatory elements that can be operatively linked to the polynucleotide. The term “regulatory element” is intended to include promoters, enhancers, internal ribosomal entry sites (IRES) and other expression control elements (e.g., transcription termination signals, such as polyadenylation signals and poly-U sequences). Such regulatory elements are described, for example, in Goeddel, GENE EXPRESSION TECHNOLOGY: METHODS IN ENZYMOLOGY 185, Academic Press, San Diego, Calif. (1990). Regulatory elements include those that direct constitutive expression of a nucleotide sequence in many types of host cell and those that direct expression of the nucleotide sequence only in certain host cells (e.g., tissue-specific regulatory sequences). A tissue-specific promoter can direct expression primarily in a desired tissue of interest, such as muscle, neuron, bone, skin, blood, specific organs (e.g., liver, pancreas), or particular cell types (e.g., lymphocytes). Regulatory elements may also direct expression in a temporal-dependent manner, such as in a cell-cycle dependent or developmental stage-dependent manner, which may or may not also be tissue or cell-type specific. In some embodiments, a vector comprises one or more pol III promoter (e.g., 1, 2, 3, 4, 5, or more pol III promoters), one or more pol II promoters (e.g., 1, 2, 3, 4, 5, or more pol II promoters), one or more pol I promoters (e.g., 1, 2, 3, 4, 5, or more pol I promoters), or combinations thereof. Examples of pol III promoters include, but are not limited to, U6 and H1 promoters. Examples of pol II promoters include, but are not limited to, the retroviral Rous sarcoma virus (RSV) LTR promoter (optionally with the RSV enhancer), the cytomegalovirus (CMV) promoter (optionally with the CMV enhancer) (see, e.g., Boshart et al, Cell, 41:521-530 (1985)), the SV40 promoter, the dihydrofolate reductase promoter, the β-actin promoter, the phosphoglycerol kinase (PGK) promoter, and the EF1α promoter. Also encompassed by the term “regulatory element” are enhancer elements, such as WPRE; CMV enhancers; the R-U5′ segment in LTR of HTLV-I (Mol. Cell. Biol., Vol. 8(1), p. 466-472, 1988); SV40 enhancer; and the intron sequence between exons 2 and 3 of rabbit β-globin (Proc. Natl. Acad. Sci. USA., Vol. 78(3), p. 1527-31, 1981).

[0194] In some embodiments, the regulatory sequence can be a regulatory sequence described in U.S. Pat. No. 7,776,321, U.S. Pat. Pub. No. 2011/0027239, and PCT publication WO 2011/028929, the contents of which are incorporated by reference herein in their entirety. In some embodiments, the vector can contain a minimal promoter. In some embodiments, the minimal promoter is the Mecp2 promoter, tRNA promoter, or U6. In a further embodiment, the minimal promoter is tissue specific. In some embodiments, the length of the vector polynucleotide the minimal promoters and polynucleotide sequences is less than 4.4 Kb.

[0195] To express a polynucleotide, the vector can include one or more transcriptional and/or translational initiation regulatory sequences, e.g. promoters, that direct the transcription of the gene and/or translation of the encoded protein in a cell. In some embodiments a constitutive promoter may be employed. Suitable constitutive promoters for mammalian cells are generally known in the art and include, but are not limited to SV40, CAG, CMV, EF-1α, β-actin, RSV, and PGK. Suitable constitutive promoters for bacterial cells, yeast cells, and fungal cells are generally known in the art, such as a T-7 promoter for bacterial expression and an alcohol dehydrogenase promoter for expression in yeast.

[0196] In some embodiments, the regulatory element can be a regulated promoter. “Regulated promoter” refers to promoters that direct gene expression not constitutively, but in a temporally- and/or spatially-regulated manner, and includes tissue-specific, tissue-preferred and inducible promoters. In some embodiments, the regulated promoter is a tissue specific promoter as previously discussed elsewhere herein. Regulated promoters include conditional promoters and inducible promoters. In some embodiments, conditional promoters can be employed to direct expression of a polynucleotide in a specific cell type, under certain environmental conditions, and/or during a specific state of development. Suitable tissue specific promoters can include, but are not limited to, liver specific promoters (e.g. APOA2, SERPIN A1 (hAAT), CYP3A4, and MIR122), pancreatic cell promoters (e.g. INS, IRS2, Pdx1, Alx3, Ppy), cardiac specific promoters (e.g. Myh6 (alpha MHC), MYL2 (MLC-2v), TNI3 (cTnl), NPPA (ANF), Slc8a1 (Ncx1)), central nervous system cell promoters (SYN1, GFAP, INA, NES, MOBP, MBP, TH, FOXA2 (HNF3 beta)), skin cell specific promoters (e.g. FLG, K14, TGM3), immune cell specific promoters, (e.g. ITGAM, CD43 promoter, CD14 promoter, CD45 promoter, CD68 promoter), urogenital cell specific promoters (e.g. Pbsn, Upk2, Sbp, Fer114), endothelial cell specific promoters (e.g. ENG), pluripotent and embryonic germ layer cell specific promoters (e.g. Oct4, NANOG, Synthetic Oct4, T brachyury, NES, SOX17, FOXA2, MIR122), and muscle cell specific promoter (e.g. Desmin). Other tissue and/or cell specific promoters are discussed elsewhere herein and can be generally known in the art and are within the scope of this disclosure.

[0197] Inducible/conditional promoters can be positively inducible/conditional promoters (e.g. a promoter that activates transcription of the polynucleotide upon appropriate interaction with an activated activator, or an inducer (compound, environmental condition, or other stimulus) or a negative/conditional inducible promoter (e.g. a promoter that is repressed (e.g. bound by a repressor) until the repressor condition of the promotor is removed (e.g. inducer binds a repressor bound to the promoter stimulating release of the promoter by the repressor or removal of a chemical repressor from the promoter environment). The inducer can be a compound, environmental condition, or other stimulus. Thus, inducible/conditional promoters can be responsive to any suitable stimuli such as chemical, biological, or other molecular agents, temperature, light, and/or pH. Suitable inducible/conditional promoters include, but are not limited to, Tet-On, Tet-Off, Lac promoter, pBad, AlcA, LexA, Hsp70 promoter, Hsp90 promoter, pDawn, XVE/OlexA, GVG, and pOp/LhGR.

[0198] Where expression in a plant cell is desired, the components of the engineered AAV capsid system described herein are typically placed under control of a plant promoter, i.e. a promoter operable in plant cells. The use of different types of promoters is envisaged. In some embodiments, inclusion of a engineered AAV capsid system vector in a plant can be for AAV vector production purposes.

[0199] A constitutive plant promoter is a promoter that is able to express the open reading frame (ORF) that it controls in all or nearly all of the plant tissues during all or nearly all developmental stages of the plant (referred to as “constitutive expression”). One non-limiting example of a constitutive promoter is the cauliflower mosaic virus 35S promoter. Different promoters may direct the expression of a gene in different tissues or cell types, or at different stages of development, or in response to different environmental conditions. In particular embodiments, one or more of the engineered AAV capsid system components are expressed under the control of a constitutive promoter, such as the cauliflower mosaic virus 35S promoter issue-preferred promoters can be utilized to target enhanced expression in certain cell types within a particular plant tissue, for instance vascular cells in leaves or roots or in specific cells of the seed. Examples of particular promoters for use in the engineered AAV capsid system are found in Kawamata et al., (1997) Plant Cell Physiol 38:792-803; Yamamoto et al., (1997) Plant J 12:255-65; Hire et al, (1992) Plant Mol Biol 20:207-18, Kuster et al, (1995) Plant Mol Biol 29:759-72, and Capana et al., (1994) Plant Mol Biol 25:681-91.

[0200] Examples of promoters that are inducible and that can allow for spatiotemporal control of gene editing or gene expression may use a form of energy. The form of energy may include but is not limited to sound energy, electromagnetic radiation, chemical energy and/or thermal energy. Examples of inducible systems include tetracycline inducible promoters (Tet-On or Tet-Off), small molecule two-hybrid transcription activations systems (FKBP, ABA, etc.), or light inducible systems (Phytochrome, LOV domains, or cryptochrome)., such as a Light Inducible Transcriptional Effector (LITE) that direct changes in transcriptional activity in a sequence-specific manner. The components of a light inducible system may include one or more elements of the engineered AAV capsid system described herein, a light-responsive cytochrome heterodimer (e.g. from Arabidopsis thaliana), and a transcriptional activation/repression domain. In some embodiments, the vector can include one or more of the inducible DNA binding proteins provided in PCT publication WO 2014/018423 and US Publications, 2015/0291966, 2017/0166903, 2019/0203212, which describe e.g. embodiments of inducible DNA binding proteins and methods of use and can be adapted for use with the present invention.

[0201] In some embodiments, transient or inducible expression can be achieved by including, for example, chemical-regulated promotors, i.e. whereby the application of an exogenous chemical induces gene expression. Modulation of gene expression can also be obtained by including a chemical-repressible promoter, where application of the chemical represses gene expression. Chemical-inducible promoters include, but are not limited to, the maize ln2-2 promoter, activated by benzene sulfonamide herbicide safeners (De Veylder et al., (1997) Plant Cell Physiol 38:568-77), the maize GST promoter (GST-11-27, WO93/01294), activated by hydrophobic electrophilic compounds used as pre-emergent herbicides, and the tobacco PR-1 a promoter (Ono et al., (2004) Biosci Biotechnol Biochem 68:803-7) activated by salicylic acid. Promoters which are regulated by antibiotics, such as tetracycline-inducible and tetracycline-repressible promoters (Gatz et al., (1991) Mol Gen Genet 227:229-37; U.S. Pat. Nos. 5,814,618 and 5,789,156) can also be used herein.

[0202] In some embodiments, the vector or system thereof can include one or more elements capable of translocating and/or expressing an engineered AAV capsid polynucleotide to/in a specific cell component or organelle. Such organelles can include, but are not limited to, nucleus, ribosome, endoplasmic reticulum, golgi apparatus, chloroplast, mitochondria, vacuole, lysosome, cytoskeleton, plasma membrane, cell wall, peroxisome, centrioles, etc.

### Selectable Markers and Tags

[0203] One or more of the engineered AAV capsid polynucleotides can be operably linked, fused to, or otherwise modified to include a polynucleotide that encodes or is a selectable marker or tag, which can be a polynucleotide or polypeptide. In some embodiments, the polypeptide encoding a polypeptide selectable marker can be incorporated in the engineered AAV capsid system polynucleotide such that the selectable marker polypeptide, when translated, is inserted between two amino acids between the N- and C-terminus of the engineered AAV capsid polypeptide or at the N- and/or C-terminus of the engineered AAV capsid polypeptide. In some embodiments, the selectable marker or tag is a polynucleotide barcode or unique molecular identifier (UMI).

[0204] It will be appreciated that the polynucleotide encoding such selectable markers or tags can be incorporated into a polynucleotide encoding one or more components of the engineered AAV capsid system described herein in an appropriate manner to allow expression of the selectable marker or tag. Such techniques and methods are described elsewhere herein and will be instantly appreciated by one of ordinary skill in the art in view of this disclosure. Many such selectable markers and tags are generally known in the art and are intended to be within the scope of this disclosure.

[0205] Suitable selectable markers and tags include, but are not limited to, affinity tags, such as chitin binding protein (CBP), maltose binding protein (MBP), glutathione-S-transferase (GST), poly(His) tag; solubilization tags such as thioredoxin (TRX) and poly (NANP), MBP, and GST; chromatography tags such as those consisting of polyanionic amino acids, such as FLAG-tag; epitope tags such as V5-tag, Myc-tag, HA-tag and NE-tag; protein tags that can allow specific enzymatic modification (such as biotinylation by biotin ligase) or chemical modification (such as reaction with FLASH-EDT2 for fluorescence imaging), DNA and/or RNA segments that contain restriction enzyme or other enzyme cleavage sites; DNA segments that encode products that provide resistance against otherwise toxic compounds including antibiotics, such as, spectinomycin, ampicillin, kanamycin, tetracycline, Basta, neomycin phosphotransferase II (NEO), hygromycin phosphotransferase (HPT)) and the like; DNA and/or RNA segments that encode products that are otherwise lacking in the recipient cell (e.g., tRNA genes, auxotrophic markers); DNA and/or RNA segments that encode products which can be readily identified (e.g., phenotypic markers such as β-galactosidase, GUS; fluorescent proteins such as green fluorescent protein (GFP), cyan (CFP), yellow (YFP), red (RFP), luciferase, and cell surface proteins); polynucleotides that can generate one or more new primer sites for PCR (e.g., the juxtaposition of two DNA sequences not previously juxtaposed), DNA sequences not acted upon or acted upon by a restriction endonuclease or other DNA modifying enzyme, chemical, etc.; epitope tags (e.g. GFP, FLAG- and His-tags), and, DNA sequences that make a molecular barcode or unique molecular identifier (UMI), DNA sequences required for a specific modification (e.g., methylation) that allows its identification. Other suitable markers will be appreciated by those of skill in the art.

[0206] Selectable markers and tags can be operably linked to one or more components of the engineered AAV capsid system described herein via suitable linker, such as a glycine or glycine serine linkers as short as GS or GG up to (GGGGG)₃ (SEQ ID NO: 8314) or (GGGGS)₃ (SEQ ID NO: 56). Other suitable linkers are described elsewhere herein.

[0207] The vector or vector system can include one or more polynucleotides encoding one or more targeting moieties. In some embodiments, the targeting moiety encoding polynucleotides can be included in the vector or vector system, such as a viral vector system, such that they are expressed within and/or on the virus particle(s) produced such that the virus particles can be targeted to specific cells, tissues, organs, etc. In some embodiments, the targeting moiety encoding polynucleotides can be included in the vector or vector system such that the engineered AAV capsid polynucleotide(s) and/or products expressed therefrom include the targeting moiety and can be targeted to specific cells, tissues, organs, etc. In some embodiments, such as non-viral carriers, the targeting moiety can be attached to the carrier (e.g. polymer, lipid, inorganic molecule etc.) and can be capable of targeting the carrier and any attached or associated engineered AAV capsid polynucleotide(s) to specific cells, tissues, organs, etc.

### Cell-Free Vector and Polynucleotide Expression

[0208] In some embodiments, the polynucleotide encoding one or more features of the engineered AAV capsid system can be expressed from a vector or suitable polynucleotide in a cell-free in vitro system. In other words, the polynucleotide can be transcribed and optionally translated in vitro. In vitro transcription/translation systems and appropriate vectors are generally known in the art and commercially available. Generally, in vitro transcription and in vitro translation systems replicate the processes of RNA and protein synthesis, respectively, outside of the cellular environment. Vectors and suitable polynucleotides for in vitro transcription can include T7, SP6, T3, promoter regulatory sequences that can be recognized and acted upon by an appropriate polymerase to transcribe the polynucleotide or vector.

[0209] In vitro translation can be stand-alone (e.g. translation of a purified polyribonucleotide) or linked/coupled to transcription. In some embodiments, the cell-free (or in vitro) translation system can include extracts from rabbit reticulocytes, wheat germ, and/or E. coli. The extracts can include various macromolecular components that are needed for translation of exogenous RNA (e.g. 70S or 80S ribosomes, tRNAs, aminoacyl-tRNA, synthetases, initiation, elongation factors, termination factors, etc.). Other components can be included or added during the translation reaction, including but not limited to, amino acids, energy sources (ATP, GTP), energy regenerating systems (creatine phosphate and creatine phosphokinase (eukaryotic systems)) (phosphoenol pyruvate and pyruvate kinase for bacterial systems), and other co-factors (Mg2+, K+, etc.). As previously mentioned, in vitro translation can be based on RNA or DNA starting material. Some translation systems can utilize an RNA template as starting material (e.g. reticulocyte lysates and wheat germ extracts). Some translation systems can utilize a DNA template as a starting material (e.g. E. coli-based systems). In these systems transcription and translation are coupled and DNA is first transcribed into RNA, which is subsequently translated. Suitable standard and coupled cell-free translation systems are generally known in the art and are commercially available.

### Codon Optimization of Vector Polynucleotides

[0210] As described elsewhere herein, the polynucleotide encoding one or more embodiments of the engineered AAV capsid system described herein can be codon optimized. In some embodiments, one or more polynucleotides contained in a vector (“vector polynucleotides”) described herein that are in addition to an optionally codon optimized polynucleotide encoding embodiments of the engineered AAV capsid system described herein can be codon optimized. In general, codon optimization refers to a process of modifying a nucleic acid sequence for enhanced expression in the host cells of interest by replacing at least one codon (e.g., about or more than about 1, 2, 3, 4, 5, 10, 15, 20, 25, 50, or more codons) of the native sequence with codons that are more frequently or most frequently used in the genes of that host cell while maintaining the native amino acid sequence. Various species exhibit particular bias for certain codons of a particular amino acid. Codon bias (differences in codon usage between organisms) often correlates with the efficiency of translation of messenger RNA (mRNA), which is in turn believed to be dependent on, among other things, the properties of the codons being translated and the availability of particular transfer RNA (tRNA) molecules. The predominance of selected tRNAs in a cell is generally a reflection of the codons used most frequently in peptide synthesis. Accordingly, genes can be tailored for optimal gene expression in a given organism based on codon optimization. Codon usage tables are readily available, for example, at the “Codon Usage Database” available at www.kazusa.or.jp/codon/and these tables can be adapted in a number of ways. See Nakamura, Y., et al. “Codon usage tabulated from the international DNA sequence databases: status for the year 2000” Nucl. Acids Res. 28:292 (2000). Computer algorithms for codon optimizing a particular sequence for expression in a particular host cell are also available, such as Gene Forge (Aptagen; Jacobus, PA), are also available. In some embodiments, one or more codons (e.g., 1, 2, 3, 4, 5, 10, 15, 20, 25, 50, or more, or all codons) in a sequence encoding a DNA/RNA-targeting Cas protein corresponds to the most frequently used codon for a particular amino acid. As to codon usage in yeast, reference is made to the online Yeast Genome database available at http://www.yeastgenome.org/community/codon_usage.shtml, or Codon selection in yeast, Bennetzen and Hall, J Biol Chem. 1982 Mar. 25; 257(6):3026-31. As to codon usage in plants including algae, reference is made to Codon usage in higher plants, green algae, and cyanobacteria, Campbell and Gowri, Plant Physiol. 1990 January; 92(1):1-11.; as well as Codon usage in plant genes, Murray et al, Nucleic Acids Res. 1989 Jan. 25; 17(2):477-98; or Selection on the codon bias of chloroplast and cyanelle genes in different plant and algal lineages, Morton B R, J Mol Evol. 1998 April; 46(4):449-59.

[0211] The vector polynucleotide can be codon optimized for expression in a specific cell-type, tissue type, organ type, and/or subject type. In some embodiments, a codon optimized sequence is a sequence optimized for expression in a eukaryote, e.g., humans (i.e. being optimized for expression in a human or human cell), or for another eukaryote, such as another animal (e.g. a mammal or avian) as is described elsewhere herein. Such codon optimized sequences are within the ambit of the ordinary skilled artisan in view of the description herein. In some embodiments, the polynucleotide is codon optimized for a specific cell type. Such cell types can include, but are not limited to, epithelial cells (including skin cells, cells lining the gastrointestinal tract, cells lining other hollow organs), nerve cells (nerves, brain cells, spinal column cells, nerve support cells (e.g. astrocytes, glial cells, Schwann cells etc.), muscle cells (e.g. cardiac muscle, smooth muscle cells, and skeletal muscle cells), connective tissue cells (fat and other soft tissue padding cells, bone cells, tendon cells, cartilage cells), blood cells, stem cells and other progenitor cells, immune system cells, germ cells, and combinations thereof. Such codon optimized sequences are within the ambit of the ordinary skilled artisan in view of the description herein. In some embodiments, the polynucleotide is codon optimized for a specific tissue type. Such tissue types can include, but are not limited to, muscle tissue, connective tissue, connective tissue, nervous tissue, and epithelial tissue. Such codon optimized sequences are within the ambit of the ordinary skilled artisan in view of the description herein. In some embodiments, the polynucleotide is codon optimized for a specific organ. Such organs include, but are not limited to, muscles, skin, intestines, liver, spleen, brain, lungs, stomach, heart, kidneys, gallbladder, pancreas, bladder, thyroid, bone, blood vessels, blood, and combinations thereof. Such codon optimized sequences are within the ambit of the ordinary skilled artisan in view of the description herein.

[0212] In some embodiments, a vector polynucleotide is codon optimized for expression in particular cells, such as prokaryotic or eukaryotic cells. The eukaryotic cells may be those of or derived from a particular organism, such as a plant or a mammal, including but not limited to human, or non-human eukaryote or animal or mammal as discussed herein, e.g., mouse, rat, rabbit, dog, livestock, or non-human mammal or primate.

### Non-Viral Vectors and Carriers

[0213] In some embodiments, the vector is a non-viral vector or carrier. In some embodiments, non-viral vectors can have the advantage(s) of reduced toxicity and/or immunogenicity and/or increased bio-safety as compared to viral vectors. The terms of art “Non-viral vectors and carriers” and as used herein in this context refers to molecules and/or compositions that are not based on one or more component of a virus or virus genome (excluding any nucleotide to be delivered and/or expressed by the non-viral vector) that can be capable of attaching to, incorporating, coupling, and/or otherwise interacting with an engineered AAV capsid polynucleotide of the present invention and can be capable of ferrying the polynucleotide to a cell and/or expressing the polynucleotide. It will be appreciated that this does not exclude the inclusion of a virus-based polynucleotide that is to be delivered. For example, if a gRNA to be delivered is directed against a virus component and it is inserted or otherwise coupled to an otherwise non-viral vector or carrier, this would not make said vector a “viral vector”. Non-viral vectors and carriers include naked polynucleotides, chemical-based carriers, polynucleotide (non-viral) based vectors, and particle-based carriers. It will be appreciated that the term “vector” as used in the context of non-viral vectors and carriers refers to polynucleotide vectors and “carriers” used in this context refers to a non-nucleic acid or polynucleotide molecule or composition that be attached to or otherwise interact with a polynucleotide to be delivered, such as an engineered AAV capsid polynucleotide of the present invention.

### Naked Polynucleotides

[0214] In some embodiments one or more engineered AAV capsid polynucleotides described elsewhere herein can be included in a naked polynucleotide. The term of art “naked polynucleotide” as used herein refers to polynucleotides that are not associated with another molecule (e.g. proteins, lipids, and/or other molecules) that can often help protect it from environmental factors and/or degradation. As used herein, associated with includes, but is not limited to, linked to, adhered to, adsorbed to, enclosed in, enclosed in or within, mixed with, and the like. Naked polynucleotides that include one or more of the engineered AAV capsid polynucleotides described herein can be delivered directly to a host cell and optionally expressed therein. The naked polynucleotides can have any suitable two- and three-dimensional configurations. By way of non-limiting examples, naked polynucleotides can be single-stranded molecules, double stranded molecules, circular molecules (e.g. plasmids and artificial chromosomes), molecules that contain portions that are single stranded and portions that are double stranded (e.g. ribozymes), and the like. In some embodiments, the naked polynucleotide contains only the engineered AAV capsid polynucleotide(s) of the present invention. In some embodiments, the naked polynucleotide can contain other nucleic acids and/or polynucleotides in addition to the engineered AAV capsid polynucleotide(s) of the present invention. The naked polynucleotides can include one or more elements of a transposon system. Transposons and system thereof are described in greater detail elsewhere herein.

### Non-Viral Polynucleotide Vectors

[0215] In some embodiments, one or more of the engineered AAV capsid polynucleotides can be included in a non-viral polynucleotide vector. Suitable non-viral polynucleotide vectors include, but are not limited to, transposon vectors and vector systems, plasmids, bacterial artificial chromosomes, yeast artificial chromosomes, AR (antibiotic resistance)-free plasmids and miniplasmids, circular covalently closed vectors (e.g. minicircles, minivectors, miniknots,), linear covalently closed vectors (“dumbbell shaped”), MIDGE (minimalistic immunologically defined gene expression) vectors, MiLV (micro-linear vector) vectors, Ministrings, mini-intronic plasmids, PSK systems (post-segregationally killing systems), ORT (operator repressor titration) plasmids, and the like. See e.g. Hardee et al. 2017. Genes. 8(2):65.

[0216] In some embodiments, the non-viral polynucleotide vector can have a conditional origin of replication. In some embodiments, the non-viral polynucleotide vector can be an ORT plasmid. In some embodiments, the non-viral polynucleotide vector can have a minimalistic immunologically defined gene expression. In some embodiments, the non-viral polynucleotide vector can have one or more post-segregationally killing system genes. In some embodiments, the non-viral polynucleotide vector is AR-free. In some embodiments, the non-viral polynucleotide vector is a minivector. In some embodiments, the non-viral polynucleotide vector includes a nuclear localization signal. In some embodiments, the non-viral polynucleotide vector can include one or more CpG motifs. In some embodiments, the non-viral polynucleotide vectors can include one or more scaffold/matrix attachment regions (S/MARs). See e.g. Mirkovitch et al. 1984. Cell. 39:223-232, Wong et al. 2015. Adv. Genet. 89:113-152, whose techniques and vectors can be adapted for use in the present invention. S/MARs are AT-rich sequences that play a role in the spatial organization of chromosomes through DNA loop base attachment to the nuclear matrix. S/MARs are often found close to regulatory elements such as promoters, enhancers, and origins of DNA replication. Inclusion of one or S/MARs can facilitate a once-per-cell-cycle replication to maintain the non-viral polynucleotide vector as an episome in daughter cells. In embodiments, the S/MAR sequence is located downstream of an actively transcribed polynucleotide (e.g. one or more engineered AAV capsid polynucleotides of the present invention) included in the non-viral polynucleotide vector. In some embodiments, the S/MAR can be a S/MAR from the beta-interferon gene cluster. See e.g. Verghese et al. 2014. Nucleic Acid Res. 42: e53; Xu et al. 2016. Sci. China Life Sci. 59:1024-1033; Jin et al. 2016. 8:702-711; Koirala et al. 2014. Adv. Exp. Med. Biol. 801:703-709; and Nehlsen et al. 2006. Gene Ther. Mol. Biol. 10:233-244, whose techniques and vectors can be adapted for use in the present invention.

[0217] In some embodiments, the non-viral vector is a transposon vector or system thereof. As used herein, “transposon” (also referred to as transposable element) refers to a polynucleotide sequence that is capable of moving form location in a genome to another. There are several classes of transposons. Transposons include retrotransposons and DNA transposons. Retrotransposons require the transcription of the polynucleotide that is moved (or transposed) in order to transpose the polynucleotide to a new genome or polynucleotide. DNA transposons are those that do not require reverse transcription of the polynucleotide that is moved (or transposed) in order to transpose the polynucleotide to a new genome or polynucleotide. In some embodiments, the non-viral polynucleotide vector can be a retrotransposon vector. In some embodiments, the retrotransposon vector includes long terminal repeats. In some embodiments, the retrotransposon vector does not include long terminal repeats. In some embodiments, the non-viral polynucleotide vector can be a DNA transposon vector. DNA transposon vectors can include a polynucleotide sequence encoding a transposase. In some embodiments, the transposon vector is configured as a non-autonomous transposon vector, meaning that the transposition does not occur spontaneously on its own. In some of these embodiments, the transposon vector lacks one or more polynucleotide sequences encoding proteins required for transposition. In some embodiments, the non-autonomous transposon vectors lack one or more Ac elements.

[0218] In some embodiments a non-viral polynucleotide transposon vector system can include a first polynucleotide vector that contains the engineered AAV capsid polynucleotide(s) of the present invention flanked on 5′ and 3′ ends by transposon terminal inverted repeats (TIRs) and a second polynucleotide vector that includes a polynucleotide capable of encoding a transposase coupled to a promoter to drive expression of the transposase. When both are expressed in the same cell the transposase can be expressed from the second vector and can transpose the material between the TIRs on the first vector (e.g. the engineered AAV capsid polynucleotide(s) of the present invention) and integrate it into one or more positions in the host cell's genome. In some embodiments the transposon vector or system thereof can be configured as a gene trap. In some embodiments, the TIRs can be configured to flank a strong splice acceptor site followed by a reporter and/or other gene (e.g. one or more of the engineered AAV capsid polynucleotide(s) of the present invention) and a strong poly A tail. When transposition occurs while using this vector or system thereof, the transposon can insert into an intron of a gene and the inserted reporter or other gene can provoke a mis-splicing process and as a result it in activates the trapped gene.

[0219] Any suitable transposon system can be used. Suitable transposon and systems thereof can include, Sleeping Beauty transposon system (Tcl/mariner superfamily) (see e.g. Ivics et al. 1997. Cell. 91 (4): 501-510), piggyBac (piggyBac superfamily) (see e.g. Li et al. 2013 110(25): E2279-E2287 and Yusa et al. 2011. PNAS. 108(4): 1531-1536), Tol2 (superfamily hAT), Frog Prince (Tcl/mariner superfamily) (see e.g. Miskey et al. 2003 Nucleic Acid Res. 31 (23): 6873-6881) and variants thereof.

### Chemical Carriers

[0220] In some embodiments the engineered AAV capsid polynucleotide(s) can be coupled to a chemical carrier. Chemical carriers that can be suitable for delivery of polynucleotides can be broadly classified into the following classes: (i) inorganic particles, (ii) lipid-based, (iii) polymer-based, and (iv) peptide based. They can be categorized as (1) those that can form condensed complexes with a polynucleotide (such as the engineered AAV capsid polynucleotide(s) of the present invention), (2) those capable of targeting specific cells, (3) those capable of increasing delivery of the polynucleotide (such as the engineered AAV capsid polynucleotide(s) of the present invention) to the nucleus or cytosol of a host cell, (4) those capable of disintegrating from DNA/RNA in the cytosol of a host cell, and (5) those capable of sustained or controlled release. It will be appreciated that any one given chemical carrier can include features from multiple categories. The term “particle” as used herein, refers to any suitable sized particles for delivery of the engineered AAV capsid system components described herein. Suitable sizes include macro-, micro-, and nano-sized particles.

[0221] In some embodiments, the non-viral carrier can be an inorganic particle. In some embodiments, the inorganic particle can be a nanoparticle. The inorganic particles can be configured and optimized by varying size, shape, and/or porosity. In some embodiments, the inorganic particles are optimized to escape from the reticulo endothelial system. In some embodiments, the inorganic particles can be optimized to protect an entrapped molecule from degradation., the Suitable inorganic particles that can be used as non-viral carriers in this context can include, but are not limited to, calcium phosphate, silica, metals (e.g. gold, platinum, silver, palladium, rhodium, osmium, iridium, ruthenium, mercury, copper, rhenium, titanium, niobium, tantalum, and combinations thereof), magnetic compounds, particles, and materials, (e.g. supermagnetic iron oxide and magnetite), quantum dots, fullerenes (e.g. carbon nanoparticles, nanotubes, nanostrings, and the like), and combinations thereof. Other suitable inorganic non-viral carriers are discussed elsewhere herein.

[0222] In some embodiments, the non-viral carrier can be lipid-based. Suitable lipid-based carriers are also described in greater detail herein. In some embodiments, the lipid-based carrier includes a cationic lipid or an amphiphilic lipid that is capable of binding or otherwise interacting with a negative charge on the polynucleotide to be delivered (e.g. such as an engineered AAV capsid polynucleotide of the present invention). In some embodiments, chemical non-viral carrier systems can include a polynucleotide such as the engineered AAV capsid polynucleotide(s) of the present invention) and a lipid (such as a cationic lipid). These are also referred to in the art as lipoplexes. Other embodiments of lipoplexes are described elsewhere herein. In some embodiments, the non-viral lipid-based carrier can be a lipid nano emulsion. Lipid nano emulsions can be formed by the dispersion of an immiscible liquid in another stabilized emulsifying agent and can have particles of about 200 nm that are composed of the lipid, water, and surfactant that can contain the polynucleotide to be delivered (e.g. the engineered AAV capsid polynucleotide(s) of the present invention). In some embodiments, the lipid-based non-viral carrier can be a solid lipid particle or nanoparticle.

[0223] In some embodiments, the non-viral carrier can be peptide-based. In some embodiments, the peptide-based non-viral carrier can include one or more cationic amino acids. In some embodiments, 35 to 40, 45, 50, 55, 60, 65, 70, 75, 80, 85, 90, 95, 99 or 100% of the amino acids are cationic. In some embodiments, peptide carriers can be used in conjunction with other types of carriers (e.g. polymer-based carriers and lipid-based carriers to functionalize these carriers). In some embodiments, the functionalization is targeting a host cell. Suitable polymers that can be included in the polymer-based non-viral carrier can include, but are not limited to, polyethylenimine (PEI), chitosan, poly (DL-lactide) (PLA), poly (DL-Lactide-co-glycoside) (PLGA), dendrimers (see e.g. US Pat. Pub. 2017/0079916 whose techniques and compositions can be adapted for use with the engineered AAV capsid polynucleotides of the present invention), polymethacrylate, and combinations thereof.

[0224] In some embodiments, the non-viral carrier can be configured to release an engineered delivery system polynucleotide that is associated with or attached to the non-viral carrier in response to an external stimulus, such as pH, temperature, osmolarity, concentration of a specific molecule or composition (e.g. calcium, NaCl, and the like), pressure and the like. In some embodiments, the non-viral carrier can be a particle that is configured includes one or more of the engineered AAV capsid polynucleotides describe herein and an environmental triggering agent response element, and optionally a triggering agent. In some embodiments, the particle can include a polymer that can be selected from the group of polymethacrylates and polyacrylates. In some embodiments, the non-viral particle can include one or more embodiments of the compositions microparticles described in US Pat. Pubs. 20150232883 and 20050123596, whose techniques and compositions can be adapted for use in the present invention.

[0225] In some embodiments, the non-viral carrier can be a polymer-based carrier. In some embodiments, the polymer is cationic or is predominantly cationic such that it can interact in a charge-dependent manner with the negatively charged polynucleotide to be delivered (such as the engineered AAV capsid polynucleotide(s) of the present invention). Polymer-based systems are described in greater detail elsewhere herein.

### Viral Vectors

[0226] In some embodiments, the vector is a viral vector. The term of art “viral vector” and as used herein in this context refers to polynucleotide based vectors that contain one or more elements from or based upon one or more elements of a virus that can be capable of expressing and packaging a polynucleotide, such as an engineered AAV capsid polynucleotide of the present invention, into a virus particle and producing said virus particle when used alone or with one or more other viral vectors (such as in a viral vector system). Viral vectors and systems thereof can be used for producing viral particles for delivery of and/or expression of one or more components of the engineered AAV capsid system described herein. The viral vector can be part of a viral vector system involving multiple vectors. In some embodiments, systems incorporating multiple viral vectors can increase the safety of these systems. Suitable viral vectors can include adenoviral-based vectors, adeno associated vectors, helper-dependent adenoviral (HdAd) vectors, hybrid adenoviral vectors, and the like. Other embodiments of viral vectors and viral particles produce therefrom are described elsewhere herein. In some embodiments, the viral vectors are configured to produce replication incompetent viral particles for improved safety of these systems.

### Adenoviral Vectors, Helper-Dependent Adenoviral Vectors, and Hybrid Adenoviral Vectors

[0227] In some embodiments, the vector can be an adenoviral vector. In some embodiments, the adenoviral vector can include elements such that the virus particle produced using the vector or system thereof can be serotype 2, 5, or 9. In some embodiments, the polynucleotide to be delivered via the adenoviral particle can be up to about 8 kb. Thus, in some embodiments, an adenoviral vector can include a DNA polynucleotide to be delivered that can range in size from about 0.001 kb to about 8 kb. Adenoviral vectors have been used successfully in several contexts (see e.g. Teramato et al. 2000. Lancet. 355:1911-1912; Lai et al. 2002. DNA Cell. Biol. 21:895-913; Flotte et al., 1996. Hum. Gene. Ther. 7:1145-1159; and Kay et al. 2000. Nat. Genet. 24:257-261. The engineered AAV capsids can be included in an adenoviral vector to produce adenoviral particles containing said engineered AAV capsids.

[0228] In some embodiments the vector can be a helper-dependent adenoviral vector or system thereof. These are also referred to in the field as “gutless” or “gutted” vectors and are a modified generation of adenoviral vectors (see e.g. Thrasher et al. 2006. Nature. 443:E5-7). In embodiments of the helper-dependent adenoviral vector system one vector (the helper) can contain all the viral genes required for replication but contains a conditional gene defect in the packaging domain. The second vector of the system can contain only the ends of the viral genome, one or more engineered AAV capsid polynucleotides, and the native packaging recognition signal, which can allow selective packaged release from the cells (see e.g. Cideciyan et al. 2009. N Engl J Med. 361:725-727). Helper-dependent Adenoviral vector systems have been successful for gene delivery in several contexts (see e.g. Simonelli et al. 2010. J Am Soc Gene Ther. 18:643-650; Cideciyan et al. 2009. N Engl J Med. 361:725-727; Crane et al. 2012. Gene Ther. 19(4):443-452; Alba et al. 2005. Gene Ther. 12:18-S27; Croyle et al. 2005. Gene Ther. 12:579-587; Amalfitano et al. 1998. J. Virol. 72:926-933; and Morral et al. 1999. PNAS. 96:12816-12821). The techniques and vectors described in these publications can be adapted for inclusion and delivery of the engineered AAV capsid polynucleotides described herein. In some embodiments, the polynucleotide to be delivered via the viral particle produced from a helper-dependent adenoviral vector or system thereof can be up to about 38 kb. Thus, in some embodiments, a adenoviral vector can include a DNA polynucleotide to be delivered that can range in size from about 0.001 kb to about 37 kb (see e.g. Rosewell et al. 2011. J. Genet. Syndr. Gene Ther. Suppl. 5:001).

[0229] In some embodiments, the vector is a hybrid-adenoviral vector or system thereof. Hybrid adenoviral vectors are composed of the high transduction efficiency of a gene-deleted adenoviral vector and the long-term genome-integrating potential of adeno-associated, retroviruses, lentivirus, and transposon based-gene transfer. In some embodiments, such hybrid vector systems can result in stable transduction and limited integration site. See e.g. Balague et al. 2000. Blood. 95:820-828; Morral et al. 1998. Hum. Gene Ther. 9:2709-2716; Kubo and Mitani. 2003. J. Virol. 77(5):2964-2971; Zhang et al. 2013. PloS One. 8(10) e76771; and Cooney et al. 2015. Mol. Ther. 23(4):667-674), whose techniques and vectors described therein can be modified and adapted for use in the engineered AAV capsid system of the present invention. In some embodiments, a hybrid-adenoviral vector can include one or more features of a retrovirus and/or an adeno-associated virus. In some embodiments the hybrid-adenoviral vector can include one or more features of a spuma retrovirus or foamy virus (FV). See e.g. Ehrhardt et al. 2007. Mol. Ther. 15:146-156 and Liu et al. 2007. Mol. Ther. 15:1834-1841, whose techniques and vectors described therein can be modified and adapted for use in the engineered AAV capsid system of the present invention. Advantages of using one or more features from the FVs in the hybrid-adenoviral vector or system thereof can include the ability of the viral particles produced therefrom to infect a broad range of cells, a large packaging capacity as compared to other retroviruses, and the ability to persist in quiescent (non-dividing) cells. See also e.g. Ehrhardt et al. 2007. Mol. Ther. 156:146-156 and Shuji et al. 2011. Mol. Ther. 19:76-82, whose techniques and vectors described therein can be modified and adapted for use in the engineered AAV capsid system of the present invention.

### Adeno Associated Vectors

[0230] In an embodiment, the engineered vector or system thereof can be an adeno-associated vector (AAV). See, e.g., West et al., Virology 160:38-47 (1987); U.S. Pat. No. 4,797,368; WO 93/24641; Kotin, Human Gene Therapy 5:793-801 (1994); and Muzyczka, J. Clin. Invest. 94:1351 (1994). Although similar to adenoviral vectors in some of their features, AAVs have some deficiency in their replication and/or pathogenicity and thus can be safer that adenoviral vectors. In some embodiments the AAV can integrate into a specific site on chromosome 19 of a human cell with no observable side effects. In some embodiments, the capacity of the AAV vector, system thereof, and/or AAV particles can be up to about 4.7 kb. The AAV vector or system thereof can include one or more engineered capsid polynucleotides described herein.

[0231] The AAV vector or system thereof can include one or more regulatory molecules. In some embodiments the regulatory molecules can be promoters, enhancers, repressors and the like, which are described in greater detail elsewhere herein. In some embodiments, the AAV vector or system thereof can include one or more polynucleotides that can encode one or more regulatory proteins. In some embodiments, the one or more regulatory proteins can be selected from Rep78, Rep68, Rep52, Rep40, variants thereof, and combinations thereof. In some embodiments, the promoter can be a tissue specific promoter as previously discussed. In some embodiments, the tissue specific promoter can drive expression of an engineered capsid AAV capsid polynucleotide described herein.

[0232] The AAV vector or system thereof can include one or more polynucleotides that can encode one or more capsid proteins, such as the engineered AAV capsid proteins described elsewhere herein. The engineered capsid proteins can be capable of assembling into a protein shell (an engineered capsid) of the AAV virus particle. The engineered capsid can have a cell, tissue, - and/or organ-specific tropism.

[0233] In some embodiments, the AAV vector or system thereof can include one or more adenovirus helper factors or polynucleotides that can encode one or more adenovirus helper factors. Such adenovirus helper factors can include, but are not limited, E1A, E1B, E2A, E40RF6, and VA RNAs. In some embodiments, a producing host cell line expresses one or more of the adenovirus helper factors.

[0234] The AAV vector or system thereof can be configured to produce AAV particles having a specific serotype. In some embodiments, the serotype can be AAV-1, AAV-2, AAV-3, AAV-4, AAV-5, AAV-6, AAV-8, AAV-9 or any combinations thereof. In some embodiments, the AAV can be AAV1, AAV-2, AAV-5, AAV-9 or any combination thereof. One can select the AAV of the AAV with regard to the cells to be targeted; e.g., one can select AAV serotypes 1, 2, 5, 9 or a hybrid capsid AAV-1, AAV-2, AAV-5, AAV-9 or any combination thereof for targeting brain and/or neuronal cells; and one can select AAV-4 for targeting cardiac tissue; and one can select AAV-8 for delivery to the liver. Thus, in some embodiments, an AAV vector or system thereof capable of producing AAV particles capable of targeting the brain and/or neuronal cells can be configured to generate AAV particles having serotypes 1, 2, 5 or a hybrid capsid AAV-1, AAV-2, AAV-5 or any combination thereof. In some embodiments, an AAV vector or system thereof capable of producing AAV particles capable of targeting cardiac tissue can be configured to generate an AAV particle having an AAV-4 serotype. In some embodiments, an AAV vector or system thereof capable of producing AAV particles capable of targeting the liver can be configured to generate an AAV having an AAV-8 serotype. See also Srivastava. 2017. Curr. Opin. Virol. 21:75-80.

[0235] It will be appreciated that while the different serotypes can provide some level of cell, tissue, and/or organ specificity, each serotype still is multi-tropic and thus can result in tissue-toxicity if using that serotype to target a tissue that the serotype is less efficient in transducing. Thus, in addition to achieving some tissue targeting capacity via selecting an AAV of a particular serotype, it will be appreciated that the tropism of the AAV serotype can be modified by an engineered AAV capsid described herein. As described elsewhere herein, variants of wild-type AAV of any serotype can be generated via a method described herein and determined to have a particular cell-specific tropism, which can be the same or different as that of the reference wild-type AAV serotype. In some embodiments, the cell, tissue, and/or specificity of the wild-type serotype can be enhanced (e.g. made more selective or specific for a particular cell type that the serotype is already biased towards). For example, wild-type AAV-9 is biased towards muscle and brain in humans (see e.g. Srivastava. 2017. Curr. Opin. Virol. 21:75-80.) By including an engineered AAV capsid and/or capsid protein variant of wild-type AAV-9 as described herein, the bias for e.g. brain can be reduced or eliminated and/or the muscle septicity increased such that the brain specificity appears reduced in comparison, thus enhancing the specificity for the muscle as compared to the wild-type AAV-9. As previously mentioned, inclusion of an engineered capsid and/or capsid protein variant of a wild-type AAV serotype can have a different tropism than the wild-type reference AAV serotype. For example, an engineered AAV capsid and/or capsid protein variant of AAV-9 can have specificity for a tissue other than muscle or brain in humans.

[0236] In some embodiments, the AAV vector is a hybrid AAV vector or system thereof. Hybrid AAVs are AAVs that include genomes with elements from one serotype that are packaged into a capsid derived from at least one different serotype. For example, if it is the rAAV2/5 that is to be produced, and if the production method is based on the helper-free, transient transfection method discussed above, the 1st plasmid and the 3rd plasmid (the adeno helper plasmid) will be the same as discussed for rAAV2 production. However, the 2nd plasmid, the pRepCap will be different. In this plasmid, called pRep2/Cap5, the Rep gene is still derived from AAV2, while the Cap gene is derived from AAV5. The production scheme is the same as the above-mentioned approach for AAV2 production. The resulting rAAV is called rAAV2/5, in which the genome is based on recombinant AAV2, while the capsid is based on AAV5. It is assumed the cell or tissue-tropism displayed by this AAV2/5 hybrid virus should be the same as that of AAV5. It will be appreciated that wild-type hybrid AAV particles suffer the same specificity issues as with the non-hybrid wild-type serotypes previously discussed.

[0237] Advantages achieved by the wild-type based hybrid AAV systems can be combined with the increased and customizable cell-specificity that can be achieved with the engineered AAV capsids can be combined by generating a hybrid AAV that can include an engineered AAV capsid described elsewhere herein. It will be appreciated that hybrid AAVs can contain an engineered AAV capsid containing a genome with elements from a different serotype than the reference wild-type serotype that the engineered AAV capsid is a variant of. For example, a hybrid AAV can be produced that includes an engineered AAV capsid that is a variant of an AAV-9 serotype that is used to package a genome that contains components (e.g. rep elements) from an AAV-2 serotype. As with wild-type based hybrid AAVs previously discussed, the tropism of the resulting AAV particle will be that of the engineered AAV capsid.

[0238] A tabulation of certain wild-type AAV serotypes as to these cells can be found in Grimm, D. et al, J. Virol. 82:5887-5911 (2008) reproduced below as Table 7. Further tropism details can be found in Srivastava. 2017. Curr. Opin. Virol. 21:75-80 as previously discussed.

TABLE 7

| Cell Line | AAV-1 | AAV-2 | AAV-3 | AAV-4 | AAV-5 | AAV-6 | AAV-8 | AAV-9 |
|---|---|---|---|---|---|---|---|---|
| Huh-7 | 13 | 100 | 2.5 | 0.0 | 0.1 | 10 | 0.7 | 0.0 |
| HEK293 | 25 | 100 | 2.5 | 0.1 | 0.1 | 5 | 0.7 | 0.1 |
| HeLa | 3 | 100 | 2.0 | 0.1 | 6.7 | 1 | 0.2 | 0.1 |
| HepG2 | 3 | 100 | 16.7 | 0.3 | 1.7 | 5 | 0.3 | ND |
| Hep1A | 20 | 100 | 0.2 | 1.0 | 0.1 | 1 | 0.2 | 0.0 |
| 911 | 17 | 100 | 11 | 0.2 | 0.1 | 17 | 0.1 | ND |
| CHO | 100 | 100 | 14 | 1.4 | 333 | 50 | 10 | 1.0 |
| COS | 33 | 100 | 33 | 3.3 | 5.0 | 14 | 2.0 | 0.5 |
| MeWo | 10 | 100 | 20 | 0.3 | 6.7 | 10 | 1.0 | 0.2 |
| NIH3T3 | 10 | 100 | 2.9 | 2.9 | 0.3 | 10 | 0.3 | ND |
| A549 | 14 | 100 | 20 | ND | 0.5 | 10 | 0.5 | 0.1 |
| HT1180 | 20 | 100 | 10 | 0.1 | 0.3 | 33 | 0.5 | 0.1 |
| Monocytes | 1111 | 100 | ND | ND | 125 | 1429 | ND | ND |
| Immature DC | 2500 | 100 | ND | ND | 222 | 2857 | ND | ND |
| Mature DC | 2222 | 100 | ND | ND | 333 | 3333 | ND | ND |

[0239] In some embodiments, the AAV vector or system thereof is configured as a “gutless” vector, similar to that described in connection with a retroviral vector. In some embodiments, the “gutless” AAV vector or system thereof can have the cis-acting viral DNA elements involved in genome amplification and packaging in linkage with the heterologous sequences of interest (e.g. the engineered AAV capsid polynucleotide(s)).

### Vector Construction

[0240] The vectors described herein can be constructed using any suitable process or technique. In some embodiments, one or more suitable recombination and/or cloning methods or techniques can be used to the vector(s) described herein. Suitable recombination and/or cloning techniques and/or methods can include, but not limited to, those described in U.S. Patent Publication No. US 2004-0171156 A1. Other suitable methods and techniques are described elsewhere herein.

[0241] Construction of recombinant AAV vectors are described in a number of publications, including U.S. Pat. No. 5,173,414; Tratschin et al., Mol. Cell. Biol. 5:3251-3260 (1985); Tratschin, et al., Mol. Cell. Biol. 4:2072-2081 (1984); Hermonat & Muzyczka, PNAS 81:6466-6470 (1984); and Samulski et al., J. Virol. 63:03822-3828 (1989). Any of the techniques and/or methods can be used and/or adapted for constructing an AAV or other vector described herein. AAV vectors are discussed elsewhere herein.

[0242] In some embodiments, the vector can have one or more insertion sites, such as a restriction endonuclease recognition sequence (also referred to as a “cloning site”). In some embodiments, one or more insertion sites (e.g., about or more than about 1, 2, 3, 4, 5, 6, 7, 8, 9, 10, or more insertion sites) are located upstream and/or downstream of one or more sequence elements of one or more vectors.

[0243] Delivery vehicles, vectors, particles, nanoparticles, formulations and components thereof for expression of one or more elements of a engineered AAV capsid system described herein are as used in the foregoing documents, such as WO 2014/093622 (PCT/US2013/074667) and are discussed in greater detail herein.

Virus Particle Production from Viral Vectors

### AAV Particle Production

[0244] There are two main strategies for producing AAV particles from AAV vectors and systems thereof, such as those described herein, which depend on how the adenovirus helper factors are provided (helper v. helper free). In some embodiments, a method of producing AAV particles from AAV vectors and systems thereof can include adenovirus infection into cell lines that stably harbor AAV replication and capsid encoding polynucleotides along with AAV vector containing the polynucleotide to be packaged and delivered by the resulting AAV particle (e.g. the engineered AAV capsid polynucleotide(s)). In some embodiments, a method of producing AAV particles from AAV vectors and systems thereof can be a “helper free” method, which includes co-transfection of an appropriate producing cell line with three vectors (e.g. plasmid vectors): (1) an AAV vector that contains a polynucleotide of interest (e.g. the engineered AAV capsid polynucleotide(s)) between 2 ITRs; (2) a vector that carries the AAV Rep-Cap encoding polynucleotides; and (helper polynucleotides. One of skill in the art will appreciate various methods and variations thereof that are both helper and -helper free and as well as the different advantages of each system.

[0245] The engineered AAV vectors and systems thereof described herein can be produced by any of these methods.

### Vector and Virus Particle Delivery

[0246] A vector (including non-viral carriers) described herein can be introduced into host cells to thereby produce transcripts, proteins, or peptides, including fusion proteins or peptides encoded by nucleic acids as described herein (e.g., engineered AAV capsid system transcripts, proteins, enzymes, mutant forms thereof, fusion proteins thereof, etc.), and virus particles (such as from viral vectors and systems thereof).

[0247] One or more engineered AAV capsid polynucleotides can be delivered using adeno associated virus (AAV), adenovirus or other plasmid or viral vector types as previously described, in particular, using formulations and doses from, for example, U.S. Pat. No. 8,454,972 (formulations, doses for adenovirus), U.S. Pat. No. 8,404,658 (formulations, doses for AAV) and U.S. Pat. No. 5,846,946 (formulations, doses for DNA plasmids) and from clinical trials and publications regarding the clinical trials involving lentivirus, AAV and adenovirus. For examples, for AAV, the route of administration, formulation and dose can be as in U.S. Pat. No. 8,454,972 and as in clinical trials involving AAV. For Adenovirus, the route of administration, formulation and dose can be as in U.S. Pat. No. 8,404,658 and as in clinical trials involving adenovirus.

[0248] For plasmid delivery, the route of administration, formulation and dose can be as in U.S. Pat. No. 5,846,946 and as in clinical studies involving plasmids. In some embodiments, doses can be based on or extrapolated to an average 70 kg individual (e.g. a male adult human), and can be adjusted for patients, subjects, mammals of different weight and species. Frequency of administration is within the ambit of the medical or veterinary practitioner (e.g., physician, veterinarian), depending on usual factors including the age, sex, general health, other conditions of the patient or subject and the particular condition or symptoms being addressed. The viral vectors can be injected into or otherwise delivered to the tissue or cell of interest.

[0249] In terms of in vivo delivery, AAV is advantageous over other viral vectors for a couple of reasons such as low toxicity (this may be due to the purification method not requiring ultra-centrifugation of cell particles that can activate the immune response) and a low probability of causing insertional mutagenesis because it doesn't integrate into the host genome.

[0250] The vector(s) and virus particles described herein can be delivered in to a host cell in vitro, in vivo, and/or ex vivo. Delivery can occur by any suitable method including, but not limited to, physical methods, chemical methods, and biological methods. Physical delivery methods are those methods that employ physical force to counteract the membrane barrier of the cells to facilitate intracellular delivery of the vector. Suitable physical methods include, but are not limited to, needles (e.g. injections), ballistic polynucleotides (e.g. particle bombardment, micro projectile gene transfer, and gene gun), electroporation, sonoporation, photoporation, magnetofection, hydroporation, and mechanical massage. Chemical methods are those methods that employ a chemical to elicit a change in the cells membrane permeability or other characteristic(s) to facilitate entry of the vector into the cell. For example, the environmental pH can be altered which can elicit a change in the permeability of the cell membrane. Biological methods are those that rely and capitalize on the host cell's biological processes or biological characteristics to facilitate transport of the vector (with or without a carrier) into a cell. For example, the vector and/or its carrier can stimulate an endocytosis or similar process in the cell to facilitate uptake of the vector into the cell.

[0251] Delivery of engineered AAV capsid system components (e.g. polynucleotides encoding engineered AAV capsid and/or capsid proteins) to cells via particles. The term “particle” as used herein, refers to any suitable sized particles for delivery of the engineered AAV capsid system components described herein. Suitable sizes include macro-, micro-, and nano-sized particles. In some embodiments, any of the engineered AAV capsid system components (e.g. polypeptides, polynucleotides, vectors and combinations thereof described herein) can be attached to, coupled to, integrated with, otherwise associated with one or more particles or component thereof as described herein. The particles described herein can then be administered to a cell or organism by an appropriate route and/or technique. In some embodiments, particle delivery can be selected and be advantageous for delivery of the polynucleotide or vector components. It will be appreciated that in embodiments, particle delivery can also be advantageous for other engineered capsid system molecules and formulations described elsewhere herein.

### Engineered Virus Particles Including an Engineered AAV Capsid

[0252] Also described herein are engineered virus particles (also referred to here and elsewhere herein as “engineered AAV particles”) that can contain an engineered AAV capsid as described in detail elsewhere herein. It will be appreciated that the engineered AAV particles can be adenovirus-based particles, helper adenovirus-based particles, AAV-based particles, or hybrid adenovirus-based particles that contain at least one engineered AAV capsid proteins as previously described. An engineered AAV capsid is one that contains one or more engineered AAV capsid proteins as are described elsewhere herein. In some embodiments, the engineered AAV particles can include 1-60 engineered AAV capsid proteins described herein. In some embodiments, the engineered AAV particles can contain 1, 2, 3, 4, 5, 6, 7, 8, 9, 10, 11, 12, 13, 14, 15, 16, 17, 18, 19, 20, 21, 22, 23, 24, 25, 26, 27, 28, 29, 30, 31, 32, 33, 34, 35, 36, 37, 38, 39, 40, 41, 42, 43, 44, 45, 46, 47, 48, 49, 50, 51, 52, 53, 54, 55, 56, 57, 58, 59, or 60 engineered capsid proteins. In some embodiments, the engineered AAV particles can contain 0-59 wild-type AAV capsid proteins. In some embodiments, the engineered AAV particles can contain 0, 1, 2, 3, 4, 5, 6, 7, 8, 9, 10, 11, 12, 13, 14, 15, 16, 17, 18, 19, 20, 21, 22, 23, 24, 25, 26, 27, 28, 29, 30, 31, 32, 33, 34, 35, 36, 37, 38, 39, 40, 41, 42, 43, 44, 45, 46, 47, 48, 49, 50, 51, 52, 53, 54, 55, 56, 57, 58, or 59 wild-type AAV capsid proteins. The engineered AAV particles can thus include one or more n-mer motifs as is previously described.

[0253] The engineered AAV particle can include one or more cargo polynucleotides. Cargo polynucleotides are discussed in greater detail elsewhere herein. Methods of making the engineered AAV particles from viral and non-viral vectors are described elsewhere herein. Formulations containing the engineered virus particles are described elsewhere herein.

### Cargo Polynucleotides

[0254] The engineered AAV capsid polynucleotides, other AAV polynucleotide(s), and/or vector polynucleotides can contain one or more cargo polynucleotides. In some embodiments, the one or more cargo polynucleotides can be operably linked to the engineered AAV capsid polynucleotide(s) and can be part of the engineered AAV genome of the AAV system of the present invention. The cargo polynucleotides can be packaged into an engineered AAV particle, which can be delivered to, e.g., a cell. In some embodiments, the cargo polynucleotide can be capable of modifying a polynucleotide (e.g. gene or transcript) of a cell to which it is delivered. As used herein, “gene” can refer to a hereditary unit corresponding to a sequence of DNA that occupies a specific location on a chromosome and that contains the genetic instruction for a characteristic(s) or trait(s) in an organism. The term gene can refer to translated and/or untranslated regions of a genome. “Gene” can refer to the specific sequence of DNA that is transcribed into an RNA transcript that can be translated into a polypeptide or be a catalytic RNA molecule, including but not limited to, tRNA, siRNA, piRNA, miRNA, long-non-coding RNA and shRNA. Polynucleotide, gene, transcript, etc. modification includes all genetic engineering techniques including, but not limited to, gene editing as well as conventional recombinational gene modification techniques (e.g. whole or partial gene insertion, deletion, and mutagenesis (e.g. insertional and deletional mutagenesis) techniques.

### Gene Modification Cargo Polynucleotides

[0255] In some embodiments, the cargo molecule can be a polynucleotide or polypeptide that can alone or when delivered as part of a system, whether or not delivered with other components of the system, operate to modify the genome, epigenome, and/or transcriptome of a cell to which it is delivered. Such systems include, but are not limited to, CRISPR-Cas systems. Other gene modification systems, e.g. TALENs, Zinc Finger nucleases, Cre-Lox, etc. are other non-limiting examples of gene modification systems whose one or more components can be delivered by the engineered AAV particles described herein.

[0256] In some embodiments, the cargo molecule is a gene editing system or component thereof. In some embodiments, the cargo molecule is a CRISPR-Cas system molecule or a component thereof. In some embodiments, the cargo molecule is a polynucleotide that encodes one or more components of a gene modification system (such as a CRISPR-Cas system). In some embodiments the cargo molecule is a gRNA.

### CRISPR-Cas System Cargo Molecules

[0257] In some embodiments, the engineered AAV particles can include one or more CRISPR-Cas system molecules, which can be polynucleotides or polypeptides. In some embodiments, the polynucleotides can encode one or more CRISPR-Cas system molecules. In some embodiments, the polynucleotide encodes a Cas protein, a CRISPR Cascade protein, a gRNA, or a combination thereof. Other CRISPR-Cas system molecules are discussed elsewhere herein and can be delivered either as a polypeptide or a polynucleotide.

[0258] In general, a CRISPR-Cas or CRISPR system as used in herein and in documents, such as International Patent Publication No. WO 2014/093622 (PCT/US2013/074667), refers collectively to transcripts and other elements involved in the expression of or directing the activity of CRISPR-associated (“Cas”) genes, including sequences encoding a Cas gene, a tracr (trans-activating CRISPR) sequence (e.g. tracrRNA or an active partial tracrRNA), a tracr-mate sequence (encompassing a “direct repeat” and a tracrRNA-processed partial direct repeat in the context of an endogenous CRISPR system), a guide sequence (also referred to as a “spacer” in the context of an endogenous CRISPR system), or “RNA(s)” as that term is herein used (e.g., RNA(s) to guide Cas, such as Cas9, e.g. CRISPR RNA and transactivating (tracr) RNA or a single guide RNA (sgRNA) (chimeric RNA)) or other sequences and transcripts from a CRISPR locus. In general, a CRISPR system is characterized by elements that promote the formation of a CRISPR complex at the site of a target sequence (also referred to as a protospacer in the context of an endogenous CRISPR system). See, e.g., Shmakov et al. (2015) “Discovery and Functional Characterization of Diverse Class 2 CRISPR-Cas Systems”, Molecular Cell, DOI: dx.doi.org/10.1016/j.molcel.2015.10.008.

[0259] In certain embodiments, a protospacer adjacent motif (PAM) or PAM-like motif directs binding of the effector protein complex as disclosed herein to the target locus of interest. In some embodiments, the PAM may be a 5′ PAM (i.e., located upstream of 5′ end of the protospacer). In other embodiments, the PAM may be a 3′ PAM (i.e., located downstream of the 5′ end of the protospacer). The term “PAM” may be used interchangeably with the term “PFS” or “protospacer flanking site” or “protospacer flanking sequence”.

[0260] In a preferred embodiment, the CRISPR effector protein may recognize a 3′ PAM. In certain embodiments, the CRISPR effector protein may recognize a 3′ PAM which is 5′H, wherein His A, C or U.

[0261] In the context of formation of a CRISPR complex, “target sequence” refers to a sequence to which a guide sequence is designed to have complementarity, where hybridization between a target sequence and a guide sequence promotes the formation of a CRISPR complex. A target sequence may comprise RNA polynucleotides. The term “target RNA” refers to a RNA polynucleotide being or comprising the target sequence. In other words, the target RNA may be a RNA polynucleotide or a part of a RNA polynucleotide to which a part of the gRNA, i.e. the guide sequence is designed to have complementarity and to which the effector function mediated by the complex comprising CRISPR effector protein and a gRNA is to be directed. In some embodiments, a target sequence is located in the nucleus or cytoplasm of a cell.

[0262] In certain example embodiments, the CRISPR effector protein may be delivered using a nucleic acid molecule encoding the CRISPR effector protein. The nucleic acid molecule encoding a CRISPR effector protein may advantageously be a codon optimized CRISPR effector protein. An example of a codon optimized sequence is, in this instance, a sequence optimized for expression in eukaryote, e.g., humans (i.e. being optimized for expression in humans), or for another eukaryote, animal or mammal as herein discussed; see, e.g., SaCas9 human codon optimized sequence in International Patent Publication No. WO 2014/093622 (PCT/US2013/074667). Whilst this is preferred, it will be appreciated that other examples are possible and codon optimization for a host species other than human, or for codon optimization for specific organs is known. In some embodiments, an enzyme coding sequence encoding a CRISPR effector protein is a codon optimized for expression in particular cells, such as eukaryotic cells. The eukaryotic cells may be those of or derived from a particular organism, such as a plant or a mammal, including but not limited to human, or non-human eukaryote or animal or mammal as herein discussed, e.g., mouse, rat, rabbit, dog, livestock, or non-human mammal or primate. In some embodiments, processes for modifying the germ line genetic identity of human beings and/or processes for modifying the genetic identity of animals which are likely to cause them suffering without any substantial medical benefit to man or animal, and also animals resulting from such processes, may be excluded. In general, codon optimization refers to a process of modifying a nucleic acid sequence for enhanced expression in the host cells of interest by replacing at least one codon (e.g. about or more than about 1, 2, 3, 4, 5, 10, 15, 20, 25, 50, or more codons) of the native sequence with codons that are more frequently or most frequently used in the genes of that host cell while maintaining the native amino acid sequence. Various species exhibit particular bias for certain codons of a particular amino acid. Codon bias (differences in codon usage between organisms) often correlates with the efficiency of translation of messenger RNA (mRNA), which is in turn believed to be dependent on, among other things, the properties of the codons being translated and the availability of particular transfer RNA (tRNA) molecules. The predominance of selected tRNAs in a cell is generally a reflection of the codons used most frequently in peptide synthesis. Accordingly, genes can be tailored for optimal gene expression in a given organism based on codon optimization. Codon usage tables are readily available, for example, at the “Codon Usage Database” available at kazusa.or.jp/codon/and these tables can be adapted in a number of ways. See Nakamura, Y., et al. “Codon usage tabulated from the international DNA sequence databases: status for the year 2000” Nucl. Acids Res. 28:292 (2000). Computer algorithms for codon optimizing a particular sequence for expression in a particular host cell are also available, such as Gene Forge (Aptagen; Jacobus, PA), are also available. In some embodiments, one or more codons (e.g. 1, 2, 3, 4, 5, 10, 15, 20, 25, 50, or more, or all codons) in a sequence encoding a Cas correspond to the most frequently used codon for a particular amino acid.

[0263] In certain embodiments, the methods as described herein may comprise providing a Cas transgenic cell in which one or more nucleic acids encoding one or more guide RNAs are provided or introduced operably connected in the cell with a regulatory element comprising a promoter of one or more gene of interest. As used herein, the term “Cas transgenic cell” refers to a cell, such as a eukaryotic cell, in which a Cas gene has been genomically integrated. The nature, type, or origin of the cell are not particularly limiting according to the present invention. Also, the way the Cas transgene is introduced in the cell may vary and can be any method as is known in the art. In certain embodiments, the Cas transgenic cell is obtained by introducing the Cas transgene in an isolated cell. In certain other embodiments, the Cas transgenic cell is obtained by isolating cells from a Cas transgenic organism. By means of example, and without limitation, the Cas transgenic cell as referred to herein may be derived from a Cas transgenic eukaryote, such as a Cas knock-in eukaryote. Reference is made to WO 2014/093622 (PCT/US13/74667), incorporated herein by reference. Methods of US Patent Publication Nos. 20120017290 and 20110265198 assigned to Sangamo BioSciences, Inc. directed to targeting the Rosa locus may be modified to utilize the CRISPR Cas system of the present invention. Methods of US Patent Publication No. 20130236946 assigned to Cellectis directed to targeting the Rosa locus may also be modified to utilize the CRISPR Cas system of the present invention. By means of further example reference is made to Platt et. al. (Cell; 159(2):440-455 (2014)), describing a Cas9 knock-in mouse, which is incorporated herein by reference. The Cas transgene can further comprise a Lox-Stop-polyA-Lox (LSL) cassette thereby rendering Cas expression inducible by Cre recombinase. Alternatively, the Cas transgenic cell may be obtained by introducing the Cas transgene in an isolated cell. Delivery systems for transgenes are well known in the art. By means of example, the Cas transgene may be delivered in for instance eukaryotic cell by means of vector (e.g., AAV, adenovirus, lentivirus) and/or particle and/or nanoparticle delivery, as also described herein elsewhere. Lentiviral and retroviral systems, as well as non-viral systems for delivering CRISPR-Cas system components are generally known in the art. AAV and adenovirus-based systems for CRISPR-Cas system components are generally known in the art as well as described herein (e.g. the engineered AAVs of the present invention).

[0264] It will be understood by the skilled person that the cell, such as the Cas transgenic cell, as referred to herein may comprise further genomic alterations besides having an integrated Cas gene or the mutations arising from the sequence specific action of Cas when complexed with RNA capable of guiding Cas to a target locus.

[0265] In certain embodiments, the invention involves vectors, e.g. for delivering or introducing in a cell Cas and/or RNA capable of guiding Cas to a target locus (i.e. guide RNA), but also for propagating these components (e.g. in prokaryotic cells). This can be in addition to delivery of one or more CRISPR-Cas components or other gene modification system component not already being delivered by an engineered AAV particle described herein. A used herein, a “vector” is a tool that allows or facilitates the transfer of an entity from one environment to another. It is a replicon, such as a plasmid, phage, or cosmid, into which another DNA segment may be inserted so as to bring about the replication of the inserted segment. Generally, a vector is capable of replication when associated with the proper control elements. In general, the term “vector” refers to a nucleic acid molecule capable of transporting another nucleic acid to which it has been linked. Vectors include, but are not limited to, nucleic acid molecules that are single-stranded, double-stranded, or partially double-stranded; nucleic acid molecules that comprise one or more free ends, no free ends (e.g. circular); nucleic acid molecules that comprise DNA, RNA, or both; and other varieties of polynucleotides known in the art. One type of vector is a “plasmid,” which refers to a circular double stranded DNA loop into which additional DNA segments can be inserted, such as by standard molecular cloning techniques. Another type of vector is a viral vector, wherein virally-derived DNA or RNA sequences are present in the vector for packaging into a virus (e.g. retroviruses, replication defective retroviruses, adenoviruses, replication defective adenoviruses, and adeno-associated viruses (AAVs)). Viral vectors also include polynucleotides carried by a virus for transfection into a host cell. Certain vectors are capable of autonomous replication in a host cell into which they are introduced (e.g. bacterial vectors having a bacterial origin of replication and episomal mammalian vectors). Other vectors (e.g., non-episomal mammalian vectors) are integrated into the genome of a host cell upon introduction into the host cell, and thereby are replicated along with the host genome. Moreover, certain vectors are capable of directing the expression of genes to which they are operatively-linked. Such vectors are referred to herein as “expression vectors.” Common expression vectors of utility in recombinant DNA techniques are often in the form of plasmids.

[0266] Recombinant expression vectors can comprise a nucleic acid of the invention in a form suitable for expression of the nucleic acid in a host cell, which means that the recombinant expression vectors include one or more regulatory elements, which may be selected on the basis of the host cells to be used for expression, that is operatively-linked to the nucleic acid sequence to be expressed. Within a recombinant expression vector, “operably linked” is intended to mean that the nucleotide sequence of interest is linked to the regulatory element(s) in a manner that allows for expression of the nucleotide sequence (e.g., in an in vitro transcription/translation system or in a host cell when the vector is introduced into the host cell). With regards to recombination and cloning methods, mention is made of U.S. patent application Ser. No. 10/815,730, published Sep. 2, 2004 as US 2004-0171156 A1, the contents of which are herein incorporated by reference in their entirety. Thus, the embodiments disclosed herein may also comprise transgenic cells comprising the CRISPR effector system. In certain example embodiments, the transgenic cell may function as an individual discrete volume. In other words, samples comprising a masking construct may be delivered to a cell, for example in a suitable delivery vesicle and if the target is present in the delivery vesicle the CRISPR effector is activated and a detectable signal generated.

[0267] The vector(s) can include the regulatory element(s), e.g., promoter(s). The vector(s) can comprise Cas encoding sequences, and/or a single, but possibly also can comprise at least 3 or 8 or 16 or 32 or 48 or 50 guide RNA(s) (e.g., sgRNAs) encoding sequences, such as 1-2, 1-3, 1-4 1-5, 3-6, 3-7, 3-8, 3-9, 3-10, 3-8, 3-16, 3-30, 3-32, 3-48, 3-50 RNA(s) (e.g., sgRNAs). In a single vector there can be a promoter for each RNA (e.g., sgRNA), advantageously when there are up to about 16 RNA(s); and, when a single vector provides for more than 16 RNA(s), one or more promoter(s) can drive expression of more than one of the RNA(s), e.g., when there are 32 RNA(s), each promoter can drive expression of two RNA(s), and when there are 48 RNA(s), each promoter can drive expression of three RNA(s). By simple arithmetic and well established cloning protocols and the teachings in this disclosure one skilled in the art can readily practice the invention as to the RNA(s) for a suitable exemplary vector such as AAV, and a suitable promoter such as the U6 promoter. For example, the packaging limit of AAV is ˜4.7 kb. The length of a single U6-gRNA (plus restriction sites for cloning) is 361 bp. Therefore, the skilled person can readily fit about 12-16, e.g., 13 U6-gRNA cassettes in a single vector. This can be assembled by any suitable means, such as a golden gate strategy used for TALE assembly (genome-engineering.org/taleffectors/). The skilled person can also use a tandem guide strategy to increase the number of U6-gRNAs by approximately 1.5 times, e.g., to increase from 12-16, e.g., 13 to approximately 18-24, e.g., about 19 U6-gRNAs. Therefore, one skilled in the art can readily reach approximately 18-24, e.g., about 19 promoter-RNAs, e.g., U6-gRNAs in a single vector, e.g., an AAV vector. A further means for increasing the number of promoters and RNAs in a vector is to use a single promoter (e.g., U6) to express an array of RNAs separated by cleavable sequences. And an even further means for increasing the number of promoter-RNAs in a vector, is to express an array of promoter-RNAs separated by cleavable sequences in the intron of a coding sequence or gene; and, in this instance it is advantageous to use a polymerase II promoter, which can have increased expression and enable the transcription of long RNA in at tissue specific manner. (see, e.g., nar.oxfordjournals.org/content/34/7/e53.short and nature.com/mt/journal/v16/n9/abs/mt2008144a.html). In an advantageous embodiment, AAV may package U6 tandem gRNA targeting up to about 50 genes. Accordingly, from the knowledge in the art and the teachings in this disclosure the skilled person can readily make and use vector(s), e.g., a single vector, expressing multiple RNAs or guides under the control or operatively or functionally linked to one or more promoters-especially as to the numbers of RNAs or guides discussed herein, without any undue experimentation.

[0268] The guide RNA(s) encoding sequences and/or Cas encoding sequences can be functionally or operatively linked to regulatory element(s) and hence the regulatory element(s) drive expression. The promoter(s) can be constitutive promoter(s) and/or conditional promoter(s) and/or inducible promoter(s) and/or tissue specific promoter(s). The promoter can be selected from the group consisting of RNA polymerases, pol I, pol II, pol III, T7, U6, H1, retroviral Rous sarcoma virus (RSV) LTR promoter, the cytomegalovirus (CMV) promoter, the SV40 promoter, the dihydrofolate reductase promoter, the β-actin promoter, the phosphoglycerol kinase (PGK) promoter, and the EF1α promoter. An advantageous promoter is the promoter is U6.

[0269] Additional effectors for use according to the invention can be identified by their proximity to cas1 genes, for example, though not limited to, within the region 20 kb from the start of the cas1 gene and 20 kb from the end of the cas1 gene. In certain embodiments, the effector protein comprises at least one HEPN domain and at least 500 amino acids, and wherein the C2c2 effector protein is naturally present in a prokaryotic genome within 20 kb upstream or downstream of a Cas gene or a CRISPR array. Non-limiting examples of Cas proteins include Cas1, Cas1B, Cas2, Cas3, Cas4, Cas5, Cas6, Cas7, Cas8, Cas9 (also known as Csn1 and Csx12), Cas10, Cas12, Cas12a, Cas13a, Cas13b, Csy1, Csy2, Csy3, Cse1, Cse2, Csc1, Csc2, Csa5, Csn2, Csm2, Csm3, Csm4, Csm5, Csm6, Cmr1, Cmr3, Cmr4, Cmr5, Cmr6, Csb1, Csb2, Csb3, Csx17, Csx14, Csx10, Csx16, CsaX, Csx3, Csx1, Csx15, Csf1, Csf2, Csf3, Csf4, homologues thereof, or modified versions thereof. In certain example embodiments, the C2c2 effector protein is naturally present in a prokaryotic genome within 20 kb upstream or downstream of a Cas 1 gene. The terms “orthologue” (also referred to as “ortholog” herein) and “homologue” (also referred to as “homolog” herein) are well known in the art. By means of further guidance, a “homologue” of a protein as used herein is a protein of the same species which performs the same or a similar function as the protein it is a homologue of. Homologous proteins may but need not be structurally related, or, are only partially structurally related. An “orthologue” of a protein as used herein is a protein of a different species which performs the same or a similar function as the protein it is an orthologue of. Orthologous proteins may but need not be structurally related, or, are only partially structurally related.

[0270] In some embodiments, one or more elements of a nucleic acid-targeting system is derived from a particular organism comprising an endogenous CRISPR RNA-targeting system. In certain embodiments, the CRISPR RNA-targeting system is found in Eubacterium and Ruminococcus. In certain embodiments, the effector protein comprises targeted and collateral ssRNA cleavage activity. In certain embodiments, the effector protein comprises dual HEPN domains. In certain embodiments, the effector protein lacks a counterpart to the Helical-1 domain of Cas13a. In certain embodiments, the effector protein is smaller than previously characterized class 2 CRISPR effectors, with a median size of 928 aa. This median size is 190 aa (17%) less than that of Cas13c, more than 200 aa (18%) less than that of Cas13b, and more than 300 aa (26%) less than that of Cas13a. In certain embodiments, the effector protein has no requirement for a flanking sequence (e.g., PFS, PAM).

[0271] In certain embodiments, the effector protein locus structures include a WYL domain containing accessory protein (so denoted after three amino acids that were conserved in the originally identified group of these domains; see, e.g., WYL domain IPR026881). In certain embodiments, the WYL domain accessory protein comprises at least one helix-turn-helix (HTH) or ribbon-helix-helix (RHH) DNA-binding domain. In certain embodiments, the WYL domain containing accessory protein increases both the targeted and the collateral ssRNA cleavage activity of the RNA-targeting effector protein. In certain embodiments, the WYL domain containing accessory protein comprises an N-terminal RHH domain, as well as a pattern of primarily hydrophobic conserved residues, including an invariant tyrosine-leucine doublet corresponding to the original WYL motif. In certain embodiments, the WYL domain containing accessory protein is WYLI. WYLI is a single WYL-domain protein associated primarily with Ruminococcus.

[0272] In other example embodiments, the Type VI RNA-targeting Cas enzyme is Cas 13d. In certain embodiments, Cas13d is Eubacterium siraeum DSM 15702 (EsCas13d) or Ruminococcus sp. N15.MGS-57 (RspCas13d) (see, e.g., Yan et al., Cas13d Is a Compact RNA-Targeting Type VI CRISPR Effector Positively Modulated by a WYL-Domain-Containing Accessory Protein, Molecular Cell (2018), doi.org/10.1016/j.molcel.2018.02.028). RspCas13d and EsCas13d have no flanking sequence requirements (e.g., PFS, PAM).

[0273] The methods, systems, and tools provided herein may be designed for use with Class 1 CRISPR proteins, which may be Type I, Type III or Type IV Cas proteins as described in Makarova et al., The CRISPR Journal, v. 1, n., 5 (2018); DOI: 10.1089/crispr.2018.0033, incorporated in its entirety herein by reference, and particularly as described in FIG. 1, p. 326. The Class 1 systems typically use a multi-protein effector complex, which can, in some embodiments, include ancillary proteins, such as one or more proteins in a complex referred to as a CRISPR-associated complex for antiviral defense (Cascade), one or more adaptation proteins (e.g. Cas1, Cas2, RNA nuclease), and/or one or more accessory proteins (e.g. Cas 4, DNA nuclease), CRISPR associated Rossman fold (CARF) domain containing proteins, and/or RNA transcriptase. Although Class 1 systems have limited sequence similarity, Class 1 system proteins can be identified by their similar architectures, including one or more Repeat Associated Mysterious Protein (RAMP) family subunits, e.g. Cas 5, Cas6, Cas7. RAMP proteins are characterized by having one or more RNA recognition motif domains. Large subunits (for example cas8 or cas10) and small subunits (for example, cas11) are also typical of Class 1 systems. See, e.g., FIGS. 1 and 2. Koonin E V, Makarova K S. 2019 Origins and evolution of CRISPR-Cas systems. Phil. Trans. R. Soc. B 374:20180087, DOI: 10.1098/rstb.2018.0087. In one embodiment, Class 1 systems are characterized by the signature protein Cas3. The Cascade in particular Class1 proteins can comprise a dedicated complex of multiple Cas proteins that binds pre-crRNA and recruits an additional Cas protein, for example Cas6 or Cas5, which is the nuclease directly responsible for processing pre-crRNA. In one embodiment, the Type I CRISPR protein comprises an effector complex comprises one or more Cas5 subunits and two or more Cas7 subunits. Class 1 subtypes include Type I-A, I-B, I-C, I-U, I-D, I-E, and I-F, Type IV-A and IV-B, and Type III-A, III-D, III-C, and III-B. Class 1 systems also include CRISPR-Cas variants, including Type I-A, I-B, I-E, I-F and I-U variants, which can include variants carried by transposons and plasmids, including versions of subtype I-F encoded by a large family of Tn7-like transposon and smaller groups of Tn7-like transposons that encode similarly degraded subtype I-B systems. Peters et al., PNAS 114 (35) (2017); DOI: 10.1073/pnas. 1709035114; see also, Makarova et al, the CRISPR Journal, v. 1, n5, FIG. 5.

### Cas Molecules

[0274] In some embodiments, the cargo molecule can be or include a Cas polypeptide and/or a polynucleotide that can encode a Cas polypeptide or a fragment thereof. Any Cas molecule can be a cargo molecule. In some embodiments, the cargo molecule is Class I CRISPR-Cas system Cas polypeptide. In some embodiments, the cargo molecule is a Class II CRISPR-Cas system Cas polypeptide. In some embodiments, the Cas polypeptide is a Type I Cas polypeptides. In some embodiments, the Cas polypeptide is a Type II Cas polypeptides. In some embodiments, the Cas polypeptides is a Type III Cas polypeptide. In some embodiments, the Cas polypeptides is a Type IV Cas polypeptide. In some embodiments, the Cas polypeptides is a Type V Cas polypeptide. In some embodiments, the Cas polypeptides is a Type VI Cas polypeptide. In some embodiments, the Cas polypeptides is a Type VII Cas polypeptide. Non-limiting examples of Cas proteins include Cas1, Cas1B, Cas2, Cas3, Cas4, Cas5, Cas6, Cas7, Cas8, Cas9 (also known as Csn1 and Csx12), Cas10, Cas12, Cas12a, Cas13a, Cas13b, Cas 13c, Cas 13d, Csy1, Csy2, Csy3, Cse1, Cse2, Csc1, Csc2, Csa5, Csn2, Csm2, Csm3, Csm4, Csm5, Csm6, Cmr1, Cmr3, Cmr4, Cmr5, Cmr6, Csb1, Csb2, Csb3, Csx17, Csx14, Csx10, Csx16, CsaX, Csx3, Csx1, Csx15, Csf1, Csf2, Csf3, Csf4, homologues thereof, or modified versions thereof.

### Guide Sequences

[0275] As used herein, the terms “guide sequence” and “guide molecule” in the context of a CRISPR-Cas system comprise any polynucleotide sequence having sufficient complementarity with a target nucleic acid sequence to hybridize with the target nucleic acid sequence and direct sequence-specific binding of a nucleic acid-targeting complex to the target nucleic acid sequence. The guide sequences made using the methods disclosed herein may be a full-length guide sequence, a truncated guide sequence, a full-length sgRNA sequence, a truncated sgRNA sequence, or an E+F sgRNA sequence. Each gRNA may be designed to include multiple binding recognition sites (e.g., aptamers) specific to the same or different adapter protein. Each gRNA may be designed to bind to the promoter region −1000-+1 nucleic acids upstream of the transcription start site (i.e. TSS), preferably −200 nucleic acids. This positioning improves functional domains which affect gene activation (e.g., transcription activators) or gene inhibition (e.g., transcription repressors). The modified gRNA may be one or more modified gRNAs targeted to one or more target loci (e.g., at least 1 gRNA, at least 2 gRNA, at least 5 gRNA, at least 10 gRNA, at least 20 gRNA, at least 30 g RNA, at least 50 gRNA) comprised in a composition. Said multiple gRNA sequences can be tandemly arranged and are preferably separated by a direct repeat.

[0276] In some embodiments, the degree of complementarity of the guide sequence to a given target sequence, when optimally aligned using a suitable alignment algorithm, is about or more than about 50%, 60%, 75%, 80%, 85%, 90%, 95%, 97.5%, 99%, or more. In certain example embodiments, the guide molecule comprises a guide sequence that may be designed to have at least one mismatch with the target sequence, such that a RNA duplex formed between the guide sequence and the target sequence. Accordingly, the degree of complementarity is preferably less than 99%. For instance, where the guide sequence consists of 24 nucleotides, the degree of complementarity is more particularly about 96% or less. In particular embodiments, the guide sequence is designed to have a stretch of two or more adjacent mismatching nucleotides, such that the degree of complementarity over the entire guide sequence is further reduced. For instance, where the guide sequence consists of 24 nucleotides, the degree of complementarity is more particularly about 96% or less, more particularly, about 92% or less, more particularly about 88% or less, more particularly about 84% or less, more particularly about 80% or less, more particularly about 76% or less, more particularly about 72% or less, depending on whether the stretch of two or more mismatching nucleotides encompasses 2, 3, 4, 5, 6 or 7 nucleotides, etc. In some embodiments, aside from the stretch of one or more mismatching nucleotides, the degree of complementarity, when optimally aligned using a suitable alignment algorithm, is about or more than about 50%, 60%, 75%, 80%, 85%, 90%, 95%, 97.5%, 99%, or more. Optimal alignment may be determined with the use of any suitable algorithm for aligning sequences, non-limiting example of which include the Smith-Waterman algorithm, the Needleman-Wunsch algorithm, algorithms based on the Burrows-Wheeler Transform (e.g., the Burrows Wheeler Aligner), Clustal W, Clustal X, BLAT, Novoalign (Novocraft Technologies; available at www.novocraft.com), ELAND (Illumina, San Diego, CA), SOAP (available at soap.genomics.org.cn), and Maq (available at maq.sourceforge.net). The ability of a guide sequence (within a nucleic acid-targeting guide RNA) to direct sequence-specific binding of a nucleic acid-targeting complex to a target nucleic acid sequence may be assessed by any suitable assay. For example, the components of a nucleic acid-targeting CRISPR system sufficient to form a nucleic acid-targeting complex, including the guide sequence to be tested, may be provided to a host cell having the corresponding target nucleic acid sequence, such as by transfection with vectors encoding the components of the nucleic acid-targeting complex, followed by an assessment of preferential targeting (e.g., cleavage) within the target nucleic acid sequence, such as by Surveyor assay as described herein. Similarly, cleavage of a target nucleic acid sequence (or a sequence in the vicinity thereof) may be evaluated in a test tube by providing the target nucleic acid sequence, components of a nucleic acid-targeting complex, including the guide sequence to be tested and a control guide sequence different from the test guide sequence, and comparing binding or rate of cleavage at or in the vicinity of the target sequence between the test and control guide sequence reactions. Other assays are possible and will occur to those skilled in the art. A guide sequence, and hence a nucleic acid-targeting guide RNA, may be selected to target any target nucleic acid sequence.

[0277] As used herein, the term “crRNA” or “guide RNA” or “single guide RNA” or “sgRNA” or “one or more nucleic acid components” of a Type V or Type VI CRISPR-Cas locus effector protein comprises any polynucleotide sequence having sufficient complementarity with a target nucleic acid sequence to hybridize with the target nucleic acid sequence and direct sequence-specific binding of a nucleic acid-targeting complex to the target nucleic acid sequence. In some embodiments, the degree of complementarity, when optimally aligned using a suitable alignment algorithm, is about or more than about 50%, 60%, 75%, 80%, 85%, 90%, 95%, 97.5%, 99%, or more. Optimal alignment may be determined with the use of any suitable algorithm for aligning sequences, non-limiting example of which include the Smith-Waterman algorithm, the Needleman-Wunsch algorithm, algorithms based on the Burrows-Wheeler Transform (e.g., the Burrows Wheeler Aligner), Clustal W, Clustal X, BLAT, Novoalign (Novocraft Technologies; available at www.novocraft.com), ELAND (Illumina, San Diego, CA), SOAP (available at soap.genomics.org.cn), and Maq (available at maq.sourceforge.net). The ability of a guide sequence (within a nucleic acid-targeting guide RNA) to direct sequence-specific binding of a nucleic acid-targeting complex to a target nucleic acid sequence may be assessed by any suitable assay. For example, the components of a nucleic acid-targeting CRISPR system sufficient to form a nucleic acid-targeting complex, including the guide sequence to be tested, may be provided to a host cell having the corresponding target nucleic acid sequence, such as by transfection with vectors encoding the components of the nucleic acid-targeting complex, followed by an assessment of preferential targeting (e.g., cleavage) within the target nucleic acid sequence, such as by Surveyor assay as described herein. Similarly, cleavage of a target nucleic acid sequence may be evaluated in a test tube by providing the target nucleic acid sequence, components of a nucleic acid-targeting complex, including the guide sequence to be tested and a control guide sequence different from the test guide sequence, and comparing binding or rate of cleavage at the target sequence between the test and control guide sequence reactions. Other assays are possible and will occur to those skilled in the art. A guide sequence, and hence a nucleic acid-targeting guide, may be selected to target any target nucleic acid sequence. The target sequence may be DNA. The target sequence may be any RNA sequence. In some embodiments, the target sequence may be a sequence within a RNA molecule selected from the group consisting of messenger RNA (mRNA), pre-mRNA, ribosomal RNA (rRNA), transfer RNA (tRNA), micro-RNA (miRNA), small interfering RNA (siRNA), small nuclear RNA (snRNA), small nucleolar RNA (snoRNA), double stranded RNA (dsRNA), non-coding RNA (ncRNA), long non-coding RNA (lncRNA), and small cytoplasmatic RNA (scRNA). In some preferred embodiments, the target sequence may be a sequence within a RNA molecule selected from the group consisting of mRNA, pre-mRNA, and rRNA. In some preferred embodiments, the target sequence may be a sequence within a RNA molecule selected from the group consisting of ncRNA, and lncRNA. In some more preferred embodiments, the target sequence may be a sequence within an mRNA molecule or a pre-mRNA molecule.

[0278] In some embodiments, a nucleic acid-targeting guide is selected to reduce the degree secondary structure within the nucleic acid-targeting guide. In some embodiments, about or less than about 75%, 50%, 40%, 30%, 25%, 20%, 15%, 10%, 5%, 1%, or fewer of the nucleotides of the nucleic acid-targeting guide participate in self-complementary base pairing when optimally folded. Optimal folding may be determined by any suitable polynucleotide folding algorithm. Some programs are based on calculating the minimal Gibbs free energy. An example of one such algorithm is mFold, as described by Zuker and Stiegler (Nucleic Acids Res. 9 (1981), 133-148). Another example folding algorithm is the online webserver RNAfold, developed at Institute for Theoretical Chemistry at the University of Vienna, using the centroid structure prediction algorithm (see e.g., A.R. Gruber et al., 2008, Cell 106(1): 23-24; and PA Carr and GM Church, 2009, Nature Biotechnology 27(12): 1151-62).

[0279] In certain embodiments, a guide RNA or crRNA may comprise, consist essentially of, or consist of a direct repeat (DR) sequence and a guide sequence or spacer sequence. In certain embodiments, the guide RNA or crRNA may comprise, consist essentially of, or consist of a direct repeat sequence fused or linked to a guide sequence or spacer sequence. In certain embodiments, the direct repeat sequence may be located upstream (i.e., 5′) from the guide sequence or spacer sequence. In other embodiments, the direct repeat sequence may be located downstream (i.e., 3′) from the guide sequence or spacer sequence.

[0280] In certain embodiments, the crRNA comprises a stem loop, preferably a single stem loop. In certain embodiments, the direct repeat sequence forms a stem loop, preferably a single stem loop.

[0281] In certain embodiments, the spacer length of the guide RNA is from 15 to 35 nt. In certain embodiments, the spacer length of the guide RNA is at least 15 nucleotides. In certain embodiments, the spacer length is from 15 to 17 nt, e.g., 15, 16, or 17 nt, from 17 to 20 nt, e.g., 17, 18, 19, or 20 nt, from 20 to 24 nt, e.g., 20, 21, 22, 23, or 24 nt, from 23 to 25 nt, e.g., 23, 24, or 25 nt, from 24 to 27 nt, e.g., 24, 25, 26, or 27 nt, from 27-30 nt, e.g., 27, 28, 29, or 30 nt, from 30-35 nt, e.g., 30, 31, 32, 33, 34, or 35 nt, or 35 nt or longer.

[0282] The “tracrRNA” sequence or analogous terms includes any polynucleotide sequence that has sufficient complementarity with a crRNA sequence to hybridize. In some embodiments, the degree of complementarity between the tracrRNA sequence and crRNA sequence along the length of the shorter of the two when optimally aligned is about or more than about 25%, 30%, 40%, 50%, 60%, 70%, 80%, 90%, 95%, 97.5%, 99%, or higher. In some embodiments, the tracr sequence is about or more than about 5, 6, 7, 8, 9, 10, 11, 12, 13, 14, 15, 16, 17, 18, 19, 20, 25, 30, 40, 50, or more nucleotides in length. In some embodiments, the tracr sequence and crRNA sequence are contained within a single transcript, such that hybridization between the two produces a transcript having a secondary structure, such as a hairpin. In an embodiment of the invention, the transcript or transcribed polynucleotide sequence has at least two or more hairpins. In preferred embodiments, the transcript has two, three, four or five hairpins. In a further embodiment of the invention, the transcript has at most five hairpins. In a hairpin structure the portion of the sequence 5′ of the final “N” and upstream of the loop corresponds to the tracr mate sequence, and the portion of the sequence 3′ of the loop corresponds to the tracr sequence.

[0283] In general, degree of complementarity is with reference to the optimal alignment of the sca sequence and tracr sequence, along the length of the shorter of the two sequences. Optimal alignment may be determined by any suitable alignment algorithm, and may further account for secondary structures, such as self-complementarity within either the sca sequence or tracr sequence. In some embodiments, the degree of complementarity between the tracr sequence and sca sequence along the length of the shorter of the two when optimally aligned is about or more than about 25%, 30%, 40%, 50%, 60%, 70%, 80%, 90%, 95%, 97.5%, 99%, or higher.

[0284] In general, the CRISPR-Cas, CRISPR-Cas9 or CRISPR system may be as used in the foregoing documents, such as International Patent Publication No. WO 2014/093622 (PCT/US2013/074667) and refers collectively to transcripts and other elements involved in the expression of or directing the activity of CRISPR-associated (“Cas”) genes, including sequences encoding a Cas gene, in particular a Cas9 gene in the case of CRISPR-Cas9, a tracr (trans-activating CRISPR) sequence (e.g. tracrRNA or an active partial tracrRNA), a tracr-mate sequence (encompassing a “direct repeat” and a tracrRNA-processed partial direct repeat in the context of an endogenous CRISPR system), a guide sequence (also referred to as a “spacer” in the context of an endogenous CRISPR system), or “RNA(s)” as that term is herein used (e.g., RNA(s) to guide Cas9, e.g. CRISPR RNA and transactivating (tracr) RNA or a single guide RNA (sgRNA) (chimeric RNA)) or other sequences and transcripts from a CRISPR locus. In general, a CRISPR system is characterized by elements that promote the formation of a CRISPR complex at the site of a target sequence (also referred to as a protospacer in the context of an endogenous CRISPR system). In the context of formation of a CRISPR complex, “target sequence” refers to a sequence to which a guide sequence is designed to have complementarity, where hybridization between a target sequence and a guide sequence promotes the formation of a CRISPR complex. The section of the guide sequence through which complementarity to the target sequence is important for cleavage activity is referred to herein as the seed sequence. A target sequence may comprise any polynucleotide, such as DNA or RNA polynucleotides. In some embodiments, a target sequence is located in the nucleus or cytoplasm of a cell, and may include nucleic acids in or from mitochondrial, organelles, vesicles, liposomes or particles present within the cell. In some embodiments, especially for non-nuclear uses, NLSs are not preferred. In some embodiments, a CRISPR system comprises one or more nuclear exports signals (NESs). In some embodiments, a CRISPR system comprises one or more NLSs and one or more NESs. In some embodiments, direct repeats may be identified in silico by searching for repetitive motifs that fulfill any or all of the following criteria: 1. found in a 2 Kb window of genomic sequence flanking the type II CRISPR locus; 2. span from 20 to 50 bp; and 3. interspaced by 20 to 50 bp. In some embodiments, 2 of these criteria may be used, for instance 1 and 2, 2 and 3, or 1 and 3. In some embodiments, all 3 criteria may be used.

[0285] In embodiments of the invention the terms guide sequence and guide RNA, i.e. RNA capable of guiding Cas to a target genomic locus, are used interchangeably as in foregoing cited documents such as International Patent Publication No. WO 2014/093622 (PCT/US2013/074667). In general, a guide sequence is any polynucleotide sequence having sufficient complementarity with a target polynucleotide sequence to hybridize with the target sequence and direct sequence-specific binding of a CRISPR complex to the target sequence. In some embodiments, the degree of complementarity between a guide sequence and its corresponding target sequence, when optimally aligned using a suitable alignment algorithm, is about or more than about 50%, 60%, 75%, 80%, 85%, 90%, 95%, 97.5%, 99%, or more. Optimal alignment may be determined with the use of any suitable algorithm for aligning sequences, non-limiting example of which include the Smith-Waterman algorithm, the Needleman-Wunsch algorithm, algorithms based on the Burrows-Wheeler Transform (e.g. the Burrows Wheeler Aligner), Clustal W, Clustal X, BLAT, Novoalign (Novocraft Technologies; available at www.novocraft.com), ELAND (Illumina, San Diego, CA), SOAP (available at soap.genomics.org.cn), and Maq (available at maq.sourceforge.net). In some embodiments, a guide sequence is about or more than about 5, 10, 11, 12, 13, 14, 15, 16, 17, 18, 19, 20, 21, 22, 23, 24, 25, 26, 27, 28, 29, 30, 35, 40, 45, 50, 75, or more nucleotides in length. In some embodiments, a guide sequence is less than about 75, 50, 45, 40, 35, 30, 25, 20, 15, 12, or fewer nucleotides in length. Preferably, the guide sequence is 10 30 nucleotides long. The ability of a guide sequence to direct sequence-specific binding of a CRISPR complex to a target sequence may be assessed by any suitable assay. For example, the components of a CRISPR system sufficient to form a CRISPR complex, including the guide sequence to be tested, may be provided to a host cell having the corresponding target sequence, such as by transfection with vectors encoding the components of the CRISPR sequence, followed by an assessment of preferential cleavage within the target sequence, such as by Surveyor assay as described herein. Similarly, cleavage of a target polynucleotide sequence may be evaluated in a test tube by providing the target sequence, components of a CRISPR complex, including the guide sequence to be tested and a control guide sequence different from the test guide sequence, and comparing binding or rate of cleavage at the target sequence between the test and control guide sequence reactions. Other assays are possible, and will occur to those skilled in the art.

[0286] In some embodiments of CRISPR-Cas systems, the degree of complementarity between a guide sequence and its corresponding target sequence can be about or more than about 50%, 60%, 75%, 80%, 85%, 90%, 95%, 97.5%, 99%, or 100%; a guide or RNA or sgRNA can be about or more than about 5, 10, 11, 12, 13, 14, 15, 16, 17, 18, 19, 20, 21, 22, 23, 24, 25, 26, 27, 28, 29, 30, 35, 40, 45, 50, 75, or more nucleotides in length; or guide or RNA or sgRNA can be less than about 75, 50, 45, 40, 35, 30, 25, 20, 15, 12, or fewer nucleotides in length; and advantageously tracr RNA is 30 or 50 nucleotides in length. However, an embodiment of the invention is to reduce off-target interactions, e.g., reduce the guide interacting with a target sequence having low complementarity. Indeed, in the examples, it is shown that the invention involves mutations that result in the CRISPR-Cas system being able to distinguish between target and off-target sequences that have greater than 80% to about 95% complementarity, e.g., 83%-84% or 88-89% or 94-95% complementarity (for instance, distinguishing between a target having 18 nucleotides from an off-target of 18 nucleotides having 1, 2 or 3 mismatches). Accordingly, in the context of the present invention the degree of complementarity between a guide sequence and its corresponding target sequence is greater than 94.5% or 95% or 95.5% or 96% or 96.5% or 97% or 97.5% or 98% or 98.5% or 99% or 99.5% or 99.9%, or 100%. Off target is less than 100% or 99.9% or 99.5% or 99% or 99% or 98.5% or 98% or 97.5% or 97% or 96.5% or 96% or 95.5% or 95% or 94.5% or 94% or 93% or 92% or 91% or 90% or 89% or 88% or 87% or 86% or 85% or 84% or 83% or 82% or 81% or 80% complementarity between the sequence and the guide, with it advantageous that off target is 100% or 99.9% or 99.5% or 99% or 99% or 98.5% or 98% or 97.5% or 97% or 96.5% or 96% or 95.5% or 95% or 94.5% complementarity between the sequence and the guide.

[0287] In particularly preferred embodiments according to the invention, the guide RNA (capable of guiding Cas to a target locus) may comprise (1) a guide sequence capable of hybridizing to a genomic target locus in the eukaryotic cell; (2) a tracr sequence; and (3) a tracr mate sequence. All (1) to (3) may reside in a single RNA, i.e. an sgRNA (arranged in a 5′ to 3′ orientation), or the tracr RNA may be a different RNA than the RNA containing the guide and tracr sequence. The tracr hybridizes to the tracr mate sequence and directs the CRISPR/Cas complex to the target sequence. Where the tracr RNA is on a different RNA than the RNA containing the guide and tracr sequence, the length of each RNA may be optimized to be shortened from their respective native lengths, and each may be independently chemically modified to protect from degradation by cellular RNase or otherwise increase stability.

[0288] The methods according to the invention as described herein comprehend inducing one or more mutations in a eukaryotic cell (in vitro, i.e. in an isolated eukaryotic cell) as herein discussed comprising delivering to cell a vector as herein discussed. The mutation(s) can include the introduction, deletion, or substitution of one or more nucleotides at each target sequence of cell(s) via the guide(s) RNA(s) or sgRNA(s). The mutations can include the introduction, deletion, or substitution of 1-75 nucleotides at each target sequence of said cell(s) via the guide(s) RNA(s) or sgRNA(s). The mutations can include the introduction, deletion, or substitution of 1, 5, 10, 11, 12, 13, 14, 15, 16, 17, 18, 19, 20, 21, 22, 23, 24, 25, 26, 27, 28, 29, 30, 35, 40, 45, 50, or 75 nucleotides at each target sequence of said cell(s) via the guide(s) RNA(s) or sgRNA(s). The mutations can include the introduction, deletion, or substitution of 5, 10, 11, 12, 13, 14, 15, 16, 17, 18, 19, 20, 21, 22, 23, 24, 25, 26, 27, 28, 29, 30, 35, 40, 45, 50, or 75 nucleotides at each target sequence of said cell(s) via the guide(s) RNA(s) or sgRNA(s). The mutations include the introduction, deletion, or substitution of 10, 11, 12, 13, 14, 15, 16, 17, 18, 19, 20, 21, 22, 23, 24, 25, 26, 27, 28, 29, 30, 35, 40, 45, 50, or 75 nucleotides at each target sequence of said cell(s) via the guide(s) RNA(s) or sgRNA(s). The mutations can include the introduction, deletion, or substitution of 20, 21, 22, 23, 24, 25, 26, 27, 28, 29, 30, 35, 40, 45, 50, or 75 nucleotides at each target sequence of said cell(s) via the guide(s) RNA(s) or sgRNA(s). The mutations can include the introduction, deletion, or substitution of 40, 45, 50, 75, 100, 200, 300, 400 or 500 nucleotides at each target sequence of said cell(s) via the guide(s) RNA(s) or sgRNA(s).

[0289] For minimization of toxicity and off-target effect, it may be important to control the concentration of Cas mRNA and guide RNA delivered. Optimal concentrations of Cas mRNA and guide RNA can be determined by testing different concentrations in a cellular or non-human eukaryote animal model and using deep sequencing the analyze the extent of modification at potential off-target genomic loci. Alternatively, to minimize the level of toxicity and off-target effect, Cas nickase mRNA (for example S. pyogenes Cas9 with the D10A mutation) can be delivered with a pair of guide RNAs targeting a site of interest. Guide sequences and strategies to minimize toxicity and off-target effects can be as in International Patent Publication No. WO 2014/093622 (PCT/US2013/074667); or, via mutation as herein.

[0290] Typically, in the context of an endogenous CRISPR system, formation of a CRISPR complex (comprising a guide sequence hybridized to a target sequence and complexed with one or more Cas proteins) results in cleavage of one or both strands in or near (e.g. within 1, 2, 3, 4, 5, 6, 7, 8, 9, 10, 20, 50, or more base pairs from) the target sequence. Without wishing to be bound by theory, the tracr sequence, which may comprise or consist of all or a portion of a wild-type tracr sequence (e.g. about or more than about 20, 26, 32, 45, 48, 54, 63, 67, 85, or more nucleotides of a wild-type tracr sequence), may also form part of a CRISPR complex, such as by hybridization along at least a portion of the tracr sequence to all or a portion of a tracr mate sequence that is operably linked to the guide sequence.

[0291] In certain embodiments, guides of the invention comprise non-naturally occurring nucleic acids and/or non-naturally occurring nucleotides and/or nucleotide analogs, and/or chemically modifications. Non-naturally occurring nucleic acids can include, for example, mixtures of naturally and non-naturally occurring nucleotides. Non-naturally occurring nucleotides and/or nucleotide analogs may be modified at the ribose, phosphate, and/or base moiety. In an embodiment of the invention, a guide nucleic acid comprises ribonucleotides and non-ribonucleotides. In one such embodiment, a guide comprises one or more ribonucleotides and one or more deoxyribonucleotides. In an embodiment of the invention, the guide comprises one or more non-naturally occurring nucleotide or nucleotide analog such as a nucleotide with phosphorothioate linkage, boranophosphate linkage, a locked nucleic acid (LNA) nucleotides comprising a methylene bridge between the 2′ and 4′ carbons of the ribose ring, peptide nucleic acids (PNA), or bridged nucleic acids (BNA). Other examples of modified nucleotides include 2′-O-methyl analogs, 2′-deoxy analogs, 2-thiouridine analogs, N6-methyladenosine analogs, or 2′-fluoro analogs. Further examples of modified nucleotides include linkage of chemical moieties at the 2′ position, including but not limited to peptides, nuclear localization sequence (NLS), peptide nucleic acid (PNA), polyethylene glycol (PEG), triethylene glycol, or tetraethyleneglycol (TEG). Further examples of modified bases include, but are not limited to, 2-aminopurine, 5-bromo-uridine, pseudouridine (Ψ), N¹-methylpseudouridine (me¹Ψ), 5-methoxyuridine (5moU), inosine, 7-methylguanosine. Examples of guide RNA chemical modifications include, without limitation, incorporation of 2′-O-methyl (M), 2′-O-methyl-3′-phosphorothioate (MS), phosphorothioate (PS), S-constrained ethyl (cEt), 2′-O-methyl-3′-thioPACE (MSP), or 2′-O-methyl-3′-phosphonoacetate (MP) at one or more terminal nucleotides. Such chemically modified guides can comprise increased stability and increased activity as compared to unmodified guides, though on-target vs. off-target specificity is not predictable. (See, Hendel, 2015, Nat Biotechnol. 33(9):985-9, doi: 10.1038/nbt.3290, published online 29 Jun. 2015; Ragdarm et al., 0215, PNAS, E7110-E7111; Allerson et al., J. Med. Chem. 2005, 48:901-904; Bramsen et al., Front. Genet., 2012, 3:154; Deng et al., PNAS, 2015, 112:11870-11875; Sharma et al., MedChemComm., 2014, 5:1454-1471; Hendel et al., Nat. Biotechnol. (2015) 33 (9): 985-989; Li et al., Nature Biomedical Engineering, 2017, 1, 0066 DOI: 10.1038/s41551-017-0066; Ryan et al., Nucleic Acids Res. (2018) 46 (2): 792-803). In some embodiments, 5′ and/or 3′ end of a guide RNA is modified by a variety of functional moieties including fluorescent dyes, polyethylene glycol, cholesterol, proteins, or detection tags. (See Kelly et al., 2016, J. Biotech. 233:74-83). In certain embodiments, a guide comprises ribonucleotides in a region that binds to a target DNA and one or more deoxyribonucleotides and/or nucleotide analogs in a region that binds to Cas9, Cpf1, or C2c1. In an embodiment of the invention, deoxyribonucleotides and/or nucleotide analogs are incorporated in engineered guide structures, such as, without limitation, 5′ and/or 3′ end, stem-loop regions, and the seed region. In certain embodiments, the modification is not in 5′-handle of the stem-loop regions. Chemical modification in the 5′-handle of the stem-loop region of a guide may abolish its function (see Li, et al., Nature Biomedical Engineering, 2017, 1:0066). In certain embodiments, at least 1, 2, 3, 4, 5, 6, 7, 8, 9, 10, 11, 12, 13, 14, 15, 16, 17, 18, 19, 20, 21, 22, 23, 24, 25, 26, 27, 28, 29, 30, 35, 40, 45, 50, or 75 nucleotides of a guide is chemically modified. In some embodiments, 3-5 nucleotides at either 3′ or 5′ end of a guide is chemically modified. In some embodiments, only minor modifications are introduced in the seed region, such as 2′-F modifications. In some embodiments, 2′-F modification is introduced at the 3′ end of a guide. In certain embodiments, three to five nucleotides at 5′ and/or 3′ end of the guide are chemically modified with 2′-O-methyl (M), 2′-O-methyl-3′-phosphorothioate (MS), S-constrained ethyl (cEt), 2′-O-methyl-3′-thioPACE (MSP), or 2′-O-methyl-3′-phosphonoacetate (MP). Such modification can enhance genome editing efficiency (see Hendel et al., Nat. Biotechnol. (2015) 33 (9): 985-989; Ryan et al., Nucleic Acids Res. (2018) 46 (2): 792-803). In certain embodiments, all of the phosphodiester bonds of a guide are substituted with phosphorothioates (PS) for enhancing levels of gene disruption. In certain embodiments, more than five nucleotides at 5′ and/or the 3′ end of the guide are chemically modified with 2′-O-Me, 2′-F or S-constrained ethyl (cEt). Such chemically modified guide can mediate enhanced levels of gene disruption (see Ragdarm et al., 0215, PNAS, E7110-E7111). In an embodiment of the invention, a guide is modified to comprise a chemical moiety at its 3′ and/or 5′ end. Such moieties include, but are not limited to amine, azide, alkyne, thio, dibenzocyclooctyne (DBCO), Rhodamine, peptides, nuclear localization sequence (NLS), peptide nucleic acid (PNA), polyethylene glycol (PEG), triethylene glycol, or tetraethyleneglycol (TEG). In certain embodiment, the chemical moiety is conjugated to the guide by a linker, such as an alkyl chain. In certain embodiments, the chemical moiety of the modified guide can be used to attach the guide to another molecule, such as DNA, RNA, protein, or nanoparticles. Such chemically modified guide can be used to identify or enrich cells generically edited by a CRISPR system (see Lee et al., eLife, 2017, 6:e25312, DOI:10.7554). In some embodiments, 3 nucleotides at each of 3′ and 5′ ends are chemically modified. In a specific embodiment, the modifications comprise 2′-O-methyl or phosphorothioate analogs. In a specific embodiment, 12 nucleotides in the tetraloop and 16 nucleotides in the stem-loop region are replaced with 2′-O-methyl analogs. Such chemical modifications improve in vivo editing and stability (see Finn et al., Cell Reports (2018), 22:2227-2235). In some embodiments, more than 60 or 70 nucleotides of the guide are chemically modified. In some embodiments, this modification comprises replacement of nucleotides with 2′-O-methyl or 2′-fluoro nucleotide analogs or phosphorothioate (PS) modification of phosphodiester bonds. In some embodiments, the chemical modification comprises 2′-O-methyl or 2′-fluoro modification of guide nucleotides extending outside of the nuclease protein when the CRISPR complex is formed or PS modification of 20 to 30 or more nucleotides of the 3′-terminus of the guide. In a particular embodiment, the chemical modification further comprises 2′-O-methyl analogs at the 5′ end of the guide or 2′-fluoro analogs in the seed and tail regions. Such chemical modifications improve stability to nuclease degradation and maintain or enhance genome-editing activity or efficiency, but modification of all nucleotides may abolish the function of the guide (see Yin et al., Nat. Biotech. (2018), 35(12): 1179-1187). Such chemical modifications may be guided by knowledge of the structure of the CRISPR complex, including knowledge of the limited number of nuclease and RNA 2′-OH interactions (see Yin et al., Nat. Biotech. (2018), 35(12): 1179-1187). In some embodiments, one or more guide RNA nucleotides may be replaced with DNA nucleotides. In some embodiments, up to 2, 4, 6, 8, 10, or 12 RNA nucleotides of 5′-end tail/seed guide region are replaced with DNA nucleotides. In certain embodiments, the majority of guide RNA nucleotides at 3′ end are replaced with DNA nucleotides. In particular embodiments, 16 guide RNA nucleotides at 3′ end are replaced with DNA nucleotides. In particular embodiments, 8 guide RNA nucleotides of 5′-end tail/seed region and 16 RNA nucleotides at the 3′ end are replaced with DNA nucleotides. In particular embodiments, guide RNA nucleotides that extend outside of the nuclease protein when the CRISPR complex is formed are replaced with DNA nucleotides. Such replacement of multiple RNA nucleotides with DNA nucleotides leads to decreased off-target activity but similar on-target activity compared to an unmodified guide; however, replacement of all RNA nucleotides at the 3′ end may abolish the function of the guide (see Yin et al., Nat. Chem. Biol. (2018) 14, 311-316). Such modifications may be guided by knowledge of the structure of the CRISPR complex, including knowledge of the limited number of nuclease and RNA 2′-OH interactions (see Yin et al., Nat. Chem. Biol. (2018) 14, 311-316).

[0292] In one embodiment of the invention, the guide comprises a modified crRNA for Cpf1, having a 5′-handle and a guide segment further comprising a seed region and a 3′-terminus. In some embodiments, the modified guide can be used with a Cpf1 of any one of Acidaminococcus sp. BV3L6 Cpf1 (AsCpf1); Francisella tularensis subsp. Novicida U112 Cpf1 (FnCpf1); L. bacterium MC2017 Cpf1 (Lb3Cpf1); Butyrivibrio proteoclasticus Cpf1 (BpCpf1); Parcubacteria bacterium GWC2011_GWC2_44_17 Cpf1 (PbCpf1); Peregrinibacteria bacterium GW2011_GWA_33_10 Cpf1 (PeCpf1); Leptospira inadai Cpf1 (LiCpf1); Smithella sp. SC_K08D17 Cpf1 (SsCpf1); L. bacterium MA2020 Cpf1 (Lb2Cpf1); Porphyromonas crevioricanis Cpf1 (PcCpf1); Porphyromonas macacae Cpf1 (PmCpf1); Candidatus Methanoplasma termitum Cpf1 (CMtCpf1); Eubacterium eligens Cpf1 (EeCpf1); Moraxella bovoculi 237 Cpf1 (MbCpf1); Prevotella disiens Cpf1 (PdCpf1); or L. bacterium ND2006 Cpf1 (LbCpf1).

[0293] In some embodiments, the modification to the guide is a chemical modification, an insertion, a deletion or a split. In some embodiments, the chemical modification includes, but is not limited to, incorporation of 2′-O-methyl (M) analogs, 2′-deoxy analogs, 2-thiouridine analogs, N6-methyladenosine analogs, 2′-fluoro analogs, 2-aminopurine, 5-bromo-uridine, pseudouridine (Ψ), N¹-methylpseudouridine (me¹Ψ), 5-methoxyuridine (5moU), inosine, 7-methylguanosine, 2′-O-methyl-3′-phosphorothioate (MS), S-constrained ethyl (cEt), phosphorothioate (PS), 2′-O-methyl-3′-thioPACE (MSP), or 2′-O-methyl-3′-phosphonoacetate (MP). In some embodiments, the guide comprises one or more of phosphorothioate modifications. In certain embodiments, at least 1, 2, 3, 4, 5, 6, 7, 8, 9, 10, 11, 12, 13, 14, 15, 16, 17, 18, 19, 20, or 25 nucleotides of the guide are chemically modified. In some embodiments, all nucleotides are chemically modified. In certain embodiments, one or more nucleotides in the seed region are chemically modified. In certain embodiments, one or more nucleotides in 3′-terminus are chemically modified. In certain embodiments, none of the nucleotides in 5′-handle is chemically modified. In some embodiments, the chemical modification in the seed region is a minor modification, such as incorporation of a 2′-fluoro analog. In a specific embodiment, one nucleotide of the seed region is replaced with a 2′-fluoro analog. In some embodiments, 5 or 10 nucleotides in 3′-terminus are chemically modified. Such chemical modifications at 3′-terminus of the Cpf1 CrRNA improve gene cutting efficiency (see Li, et al., Nature Biomedical Engineering, 2017, 1:0066). In a specific embodiment, 5 nucleotides in 3′-terminus are replaced with 2′-fluoro analogues. In a specific embodiment, 10 nucleotides in 3′-terminus are replaced with 2′-fluoro analogues. In a specific embodiment, 5 nucleotides in 3′-terminus are replaced with 2′-O-methyl (M) analogs. In some embodiments, 3 nucleotides at each of 3′ and 5′ ends are chemically modified. In a specific embodiment, the modifications comprise 2′-O-methyl or phosphorothioate analogs. In a specific embodiment, 12 nucleotides in the tetraloop and 16 nucleotides in the stem-loop region are replaced with 2′-O-methyl analogs. Such chemical modifications improve in vivo editing and stability (see Finn et al., Cell Reports (2018), 22:2227-2235).

[0294] In some embodiments, the loop of 5′-handle of the guide is modified. In some embodiments, the loop of 5′-handle of the guide is modified to have a deletion, an insertion, a split, or chemical modifications. In certain embodiments, the loop comprises 3, 4, or 5 nucleotides. In certain embodiments, the loop comprises the sequence of UCUU, UUUU, UAUU, or UGUU. In some embodiments, the guide molecule forms a stemloop with a separate non-covalently linked sequence, which can be DNA or RNA.

### Synthetically Linked Guide

[0295] In one embodiment, the guide comprises a tracr sequence and a tracr mate sequence that are chemically linked or conjugated via a non-phosphodiester bond. In one embodiment, the guide comprises a tracr sequence and a tracr mate sequence that are chemically linked or conjugated via a non-nucleotide loop. In some embodiments, the tracr and tracr mate sequences are joined via a non-phosphodiester covalent linker. Examples of the covalent linker include but are not limited to a chemical moiety selected from the group consisting of carbamates, ethers, esters, amides, imines, amidines, aminotrizines, hydrozone, disulfides, thioethers, thioesters, phosphorothioates, phosphorodithioates, sulfonamides, sulfonates, fulfones, sulfoxides, ureas, thioureas, hydrazide, oxime, triazole, photolabile linkages, C—C bond forming groups such as Diels-Alder cyclo-addition pairs or ring-closing metathesis pairs, and Michael reaction pairs.

[0296] In some embodiments, the tracr and tracr mate sequences are first synthesized using the standard phosphoramidite synthetic protocol (Herdewijn, P., ed., Methods in Molecular Biology Col 288, Oligonucleotide Synthesis: Methods and Applications, Humana Press, New Jersey (2012)). In some embodiments, the tracr or tracr mate sequences can be functionalized to contain an appropriate functional group for ligation using the standard protocol known in the art (Hermanson, G. T., Bioconjugate Techniques, Academic Press (2013)). Examples of functional groups include, but are not limited to, hydroxyl, amine, carboxylic acid, carboxylic acid halide, carboxylic acid active ester, aldehyde, carbonyl, chlorocarbonyl, imidazolylcarbonyl, hydrozide, semicarbazide, thio semicarbazide, thiol, maleimide, haloalkyl, sulfonyl, ally, propargyl, diene, alkyne, and azide. Once the tracr and the tracr mate sequences are functionalized, a covalent chemical bond or linkage can be formed between the two oligonucleotides. Examples of chemical bonds include, but are not limited to, those based on carbamates, ethers, esters, amides, imines, amidines, aminotrizines, hydrozone, disulfides, thioethers, thioesters, phosphorothioates, phosphorodithioates, sulfonamides, sulfonates, fulfones, sulfoxides, ureas, thioureas, hydrazide, oxime, triazole, photolabile linkages, C—C bond forming groups such as Diels-Alder cyclo-addition pairs or ring-closing metathesis pairs, and Michael reaction pairs.

[0297] In some embodiments, the tracr and tracr mate sequences can be chemically synthesized. In some embodiments, the chemical synthesis uses automated, solid-phase oligonucleotide synthesis machines with 2′-acetoxyethyl orthoester (2′-ACE) (Scaringe et al., J. Am. Chem. Soc. (1998) 120:11820-11821; Scaringe, Methods Enzymol. (2000) 317:3-18) or 2′-thionocarbamate (2′-TC) chemistry (Dellinger et al., J. Am. Chem. Soc. (2011) 133:11540-11546; Hendel et al., Nat. Biotechnol. (2015) 33:985-989).

[0298] In some embodiments, the tracr and tracr mate sequences can be covalently linked using various bioconjugation reactions, loops, bridges, and non-nucleotide links via modifications of sugar, internucleotide phosphodiester bonds, purine and pyrimidine residues. Sletten et al., Angew. Chem. Int. Ed. (2009) 48:6974-6998; Manoharan, M. Curr. Opin. Chem. Biol. (2004) 8:570-9; Behlke et al., Oligonucleotides (2008) 18:305-19; Watts, et al., Drug. Discov. Today (2008) 13:842-55; Shukla, et al., ChemMedChem (2010) 5:328-49.

[0299] In some embodiments, the tracr and tracr mate sequences can be covalently linked using click chemistry. In some embodiments, the tracr and tracr mate sequences can be covalently linked using a triazole linker. In some embodiments, the tracr and tracr mate sequences can be covalently linked using Huisgen 1,3-dipolar cycloaddition reaction involving an alkyne and azide to yield a highly stable triazole linker (He et al., ChemBioChem (2015) 17: 1809-1812; WO 2016/186745). In some embodiments, the tracr and tracr mate sequences are covalently linked by ligating a 5′-hexyne tracrRNA and a 3′-azide crRNA. In some embodiments, either or both of 5′-hexyne tracrRNA and a 3′-azide crRNA can be protected with 2′-acetoxyethyl orthoester (2′-ACE) group, which can be subsequently removed using Dharmacon protocol (Scaringe et al., J. Am. Chem. Soc. (1998) 120: 11820-11821; Scaringe, Methods Enzymol. (2000) 317:3-18).

[0300] In some embodiments, the tracr and tracr mate sequences can be covalently linked via a linker (e.g., a non-nucleotide loop) that comprises a moiety such as spacers, attachments, bioconjugates, chromophores, reporter groups, dye labeled RNAs, and non-naturally occurring nucleotide analogues. More specifically, suitable spacers for purposes of this invention include, but are not limited to, polyethers (e.g., polyethylene glycols, polyalcohols, polypropylene glycol or mixtures of ethylene and propylene glycols), polyamines group (e.g., spennine, spermidine and polymeric derivatives thereof), polyesters (e.g., poly(ethyl acrylate)), polyphosphodiesters, alkylenes, and combinations thereof. Suitable attachments include any moiety that can be added to the linker to add additional properties to the linker, such as but not limited to, fluorescent labels. Suitable bioconjugates include, but are not limited to, peptides, glycosides, lipids, cholesterol, phospholipids, diacyl glycerols and dialkyl glycerols, fatty acids, hydrocarbons, enzyme substrates, steroids, biotin, digoxigenin, carbohydrates, polysaccharides. Suitable chromophores, reporter groups, and dye-labeled RNAs include, but are not limited to, fluorescent dyes such as fluorescein and rhodamine, chemiluminescent, electrochemiluminescent, and bioluminescent marker compounds. The design of example linkers conjugating two RNA components are also described in International Patent Publication No. WO 2004/015075.

[0301] The linker (e.g., a non-nucleotide loop) can be of any length. In some embodiments, the linker has a length equivalent to about 0-16 nucleotides. In some embodiments, the linker has a length equivalent to about 0-8 nucleotides. In some embodiments, the linker has a length equivalent to about 0-4 nucleotides. In some embodiments, the linker has a length equivalent to about 2 nucleotides. Example linker design is also described in International Patent Publication No. WO2011/008730.

[0302] A typical Type II Cas9 sgRNA comprises (in 5′ to 3′ direction): a guide sequence, a poly U tract, a first complimentary stretch (the “repeat”), a loop (tetraloop), a second complimentary stretch (the “anti-repeat” being complimentary to the repeat), a stem, and further stem loops and stems and a poly A (often poly U in RNA) tail (terminator). In preferred embodiments, certain embodiments of guide architecture are retained, certain embodiment of guide architecture cam be modified, for example by addition, subtraction, or substitution of features, whereas certain other embodiments of guide architecture are maintained. Preferred locations for engineered sgRNA modifications, including but not limited to insertions, deletions, and substitutions include guide termini and regions of the sgRNA that are exposed when complexed with CRISPR protein and/or target, for example the tetraloop and/or loop2.

[0303] In certain embodiments, guides of the invention comprise specific binding sites (e.g. aptamers) for adapter proteins, which may comprise one or more functional domains (e.g. via fusion protein). When such a guides forms a CRISPR complex (i.e. CRISPR enzyme binding to guide and target) the adapter proteins bind and the functional domain associated with the adapter protein is positioned in a spatial orientation which is advantageous for the attributed function to be effective. For example, if the functional domain is a transcription activator (e.g. VP64 or p65), the transcription activator is placed in a spatial orientation which allows it to affect the transcription of the target. Likewise, a transcription repressor will be advantageously positioned to affect the transcription of the target and a nuclease (e.g. Fok1) will be advantageously positioned to cleave or partially cleave the target.

[0304] The skilled person will understand that modifications to the guide which allow for binding of the adapter+functional domain but not proper positioning of the adapter+functional domain (e.g. due to steric hindrance within the three-dimensional structure of the CRISPR complex) are modifications which are not intended. The one or more modified guide may be modified at the tetra loop, the stem loop 1, stem loop 2, or stem loop 3, as described herein, preferably at either the tetra loop or stem loop 2, and most preferably at both the tetra loop and stem loop 2.

[0305] The repeat: anti repeat duplex will be apparent from the secondary structure of the sgRNA. It may be typically a first complimentary stretch after (in 5′ to 3′ direction) the poly U tract and before the tetraloop; and a second complimentary stretch after (in 5′ to 3′ direction) the tetraloop and before the poly A tract. The first complimentary stretch (the “repeat”) is complimentary to the second complimentary stretch (the “anti-repeat”). As such, they Watson-Crick base pair to form a duplex of dsRNA when folded back on one another. As such, the anti-repeat sequence is the complimentary sequence of the repeat and in terms to A-U or C-G base pairing, but also in terms of the fact that the anti-repeat is in the reverse orientation due to the tetraloop.

[0306] In an embodiment of the invention, modification of guide architecture comprises replacing bases in stemloop 2. For example, in some embodiments, “actt” (“acuu” in RNA) and “aagt” (“aagu” in RNA) bases in stemloop2 are replaced with “cgcc” and “gcgg”. In some embodiments, “actt” and “aagt” bases in stemloop2 are replaced with complimentary GC-rich regions of 4 nucleotides. In some embodiments, the complimentary GC-rich regions of 4 nucleotides are “cgcc” and “gcgg” (both in 5′ to 3′ direction). In some embodiments, the complimentary GC-rich regions of 4 nucleotides are “gcgg” and “cgcc” (both in 5′ to 3′ direction). Other combination of C and G in the complimentary GC-rich regions of 4 nucleotides will be apparent including CCCC and GGGG.

[0307] In one embodiment, the stemloop 2, e.g., “ACTTgtttAAGT” (SEQ ID NO: 51) can be replaced by any “XXXXgtttYYYY” (SEQ ID NO: 52), e.g., where XXXX and YYYY represent any complementary sets of nucleotides that together will base pair to each other to create a stem.

[0308] In one embodiment, the stem comprises at least about 4 bp comprising complementary X and Y sequences, although stems of more, e.g., 5, 6, 7, 8, 9, 10, 11 or 12 or fewer, e.g., 3, 2, base pairs are also contemplated. Thus, for example X2-12 and Y2-12 (wherein X and Y represent any complementary set of nucleotides) may be contemplated. In one embodiment, the stem made of the X and Y nucleotides, together with the “gttt,” will form a complete hairpin in the overall secondary structure, and the amount of base pairs can be any amount that forms a complete hairpin. In one embodiment, any complementary X:Y base-pairing sequence (e.g., as to length) is tolerated, so long as the secondary structure of the entire sgRNA is preserved. In one embodiment, the stem can be a form of X:Y base-pairing that does not disrupt the secondary structure of the whole sgRNA in that it has a DR:tracr duplex, and 3 stemloops. In one embodiment, the “gttt” tetraloop that connects ACTT and AAGT (or any alternative stem made of X:Y base pairs) can be any sequence of the same length (e.g., 4 base pair) or longer that does not interrupt the overall secondary structure of the sgRNA. In one embodiment, the stemloop can be something that further lengthens stemloop2, e.g. can be MS2 aptamer. In one embodiment, the stemloop3 “GGCACCGagtCGGTGC” (SEQ ID NO: 53) can likewise take on a “XXXXXXXagtYYYYYYY” (SEQ ID NO: 54) form, e.g., wherein X7 and Y7 represent any complementary sets of nucleotides that together will base pair to each other to create a stem. In one embodiment, the stem comprises about 7 bp comprising complementary X and Y sequences, although stems of more or fewer base pairs are also contemplated. In one embodiment, the stem made of the X and Y nucleotides, together with the “agt”, will form a complete hairpin in the overall secondary structure. In one embodiment, any complementary X:Y base pairing sequence is tolerated, so long as the secondary structure of the entire sgRNA is preserved. In one embodiment, the stem can be a form of X:Y basepairing that doesn't disrupt the secondary structure of the whole sgRNA in that it has a DR: tracr duplex, and 3 stemloops. In one embodiment, the “agt” sequence of the stemloop 3 can be extended or be replaced by an aptamer, e.g., a MS2 aptamer or sequence that otherwise generally preserves the architecture of stemloop3. In one embodiment for alternative Stemloops 2 and/or 3, each X and Y pair can refer to any base pair. In one embodiment, non-Watson Crick base pairing is contemplated, where such pairing otherwise generally preserves the architecture of the stemloop at that position.

[0309] In one embodiment, the DR: tracrRNA duplex can be replaced with the form: gYYYYag (N) NNNNxxxxNNNN (AAN) uuRRRRu (SEQ ID NO: 55) (using standard IUPAC nomenclature for nucleotides), wherein (N) and (AAN) represent part of the bulge in the duplex, and “xxxx” represents a linker sequence. NNNN on the direct repeat can be anything so long as it base-pairs with the corresponding NNNN portion of the tracrRNA. In one embodiment, the DR: tracrRNA duplex can be connected by a linker of any length (xxxx . . . ), any base composition, as long as it doesn't alter the overall structure.

[0310] In one embodiment, the sgRNA structural requirement is to have a duplex and 3 stemloops. In most embodiments, the actual sequence requirement for many of the particular base requirements are lax, in that the architecture of the DR: tracrRNA duplex should be preserved, but the sequence that creates the architecture, i.e., the stems, loops, bulges, etc., may be altered.

### Aptamers

[0311] One guide with a first aptamer/RNA-binding protein pair can be linked or fused to an activator, whilst a second guide with a second aptamer/RNA-binding protein pair can be linked or fused to a repressor. The guides are for different targets (loci), so this allows one gene to be activated and one repressed. For example, the following schematic shows such an approach:
[0312] Guide 1-MS2 aptamer - - - MS2 RNA-binding protein - - - VP64 activator; and
[0313] Guide 2-PP7 aptamer - - - PP7 RNA-binding protein - - - SID4x repressor.

[0314] The present invention also relates to orthogonal PP7/MS2 gene targeting. In this example, sgRNA targeting different loci are modified with distinct RNA loops in order to recruit MS2-VP64 or PP7-SID4X, which activate and repress their target loci, respectively. PP7 is the RNA-binding coat protein of the bacteriophage Pseudomonas. Like MS2, it binds a specific RNA sequence and secondary structure. The PP7 RNA-recognition motif is distinct from that of MS2. Consequently, PP7 and MS2 can be multiplexed to mediate distinct effects at different genomic loci simultaneously. For example, an sgRNA targeting locus A can be modified with MS2 loops, recruiting MS2-VP64 activators, while another sgRNA targeting locus B can be modified with PP7 loops, recruiting PP7-SID4X repressor domains. In the same cell, dCas9 can thus mediate orthogonal, locus-specific modifications. This principle can be extended to incorporate other orthogonal RNA-binding proteins such as Q-beta.

[0315] An alternative option for orthogonal repression includes incorporating non-coding RNA loops with transactive repressive function into the guide (either at similar positions to the MS2/PP7 loops integrated into the guide or at the 3′ terminus of the guide). For instance, guides were designed with non-coding (but known to be repressive) RNA loops (e.g. using the Alu repressor (in RNA) that interferes with RNA polymerase II in mammalian cells). The Alu RNA sequence was located: in place of the MS2 RNA sequences as used herein (e.g. at tetraloop and/or stem loop 2); and/or at 3′ terminus of the guide. This gives possible combinations of MS2, PP7 or Alu at the tetraloop and/or stemloop 2 positions, as well as, optionally, addition of Alu at 3′ end of the guide (with or without a linker).

[0316] The use of two different aptamers (distinct RNA) allows an activator-adaptor protein fusion and a repressor-adaptor protein fusion to be used, with different guides, to activate expression of one gene, whilst repressing another. They, along with their different guides can be administered together, or substantially together, in a multiplexed approach. A large number of such modified guides can be used all at the same time, for example 10 or 20 or 30 and so forth, whilst only one (or at least a minimal number) of Cas9s to be delivered, as a comparatively small number of Cas9s can be used with a large number modified guides. The adaptor protein may be associated (preferably linked or fused to) one or more activators or one or more repressors. For example, the adaptor protein may be associated with a first activator and a second activator. The first and second activators may be the same, but they are preferably different activators. For example, one might be VP64, whilst the other might be p65, although these are just examples and other transcriptional activators are envisaged. Three or more or even four or more activators (or repressors) may be used, but package size may limit the number being higher than 5 different functional domains. Linkers are preferably used, over a direct fusion to the adaptor protein, where two or more functional domains are associated with the adaptor protein. Suitable linkers might include the GlySer linker.

[0317] It is also envisaged that the enzyme-guide complex as a whole may be associated with two or more functional domains. For example, there may be two or more functional domains associated with the enzyme, or there may be two or more functional domains associated with the guide (via one or more adaptor proteins), or there may be one or more functional domains associated with the enzyme and one or more functional domains associated with the guide (via one or more adaptor proteins).

[0318] The fusion between the adaptor protein and the activator or repressor may include a linker. For example, GlySer linkers GGGS can be used. They can be used in repeats of 3 ((GGGGS)₃) (SEQ ID NO: 56) or 6 (SEQ ID NO: 57), 9 (SEQ ID NO: 58) or even 12 (SEQ ID NO: 59) or more, to provide suitable lengths, as required. Linkers can be used between the RNA-binding protein and the functional domain (activator or repressor), or between the CRISPR Enzyme (Cas9) and the functional domain (activator or repressor). The linkers the user to engineer appropriate amounts of “mechanical flexibility”.

### Dead Guides

[0319] In one embodiment, the invention provides guide sequences which are modified in a manner which allows for formation of the CRISPR complex and successful binding to the target, while at the same time, not allowing for successful nuclease activity (i.e. without nuclease activity/without indel activity). For matters of explanation such modified guide sequences are referred to as “dead guides” or “dead guide sequences”. These dead guides or dead guide sequences can be thought of as catalytically inactive or conformationally inactive with regard to nuclease activity. Nuclease activity may be measured using surveyor analysis or deep sequencing as commonly used in the art, preferably surveyor analysis. Similarly, dead guide sequences may not sufficiently engage in productive base pairing with respect to the ability to promote catalytic activity or to distinguish on-target and off-target binding activity. Briefly, the surveyor assay involves purifying and amplifying a CRISPR target site for a gene and forming heteroduplexes with primers amplifying the CRISPR target site. After re-anneal, the products are treated with SURVEYOR nuclease and SURVEYOR enhancer S (Transgenomics) following the manufacturer's recommended protocols, analyzed on gels, and quantified based upon relative band intensities.

[0320] Hence, in a related embodiment, the invention provides a non-naturally occurring or engineered composition Cas9 CRISPR-Cas system comprising a functional Cas9 as described herein, and guide RNA (gRNA) wherein the gRNA comprises a dead guide sequence whereby the gRNA is capable of hybridizing to a target sequence such that the Cas9 CRISPR-Cas system is directed to a genomic locus of interest in a cell without detectable indel activity resultant from nuclease activity of a non-mutant Cas9 enzyme of the system as detected by a SURVEYOR assay. For shorthand purposes, a gRNA comprising a dead guide sequence whereby the gRNA is capable of hybridizing to a target sequence such that the Cas9 CRISPR-Cas system is directed to a genomic locus of interest in a cell without detectable indel activity resultant from nuclease activity of a non-mutant Cas9 enzyme of the system as detected by a SURVEYOR assay is herein termed a “dead gRNA”. It is to be understood that any of the gRNAs according to the invention as described herein elsewhere may be used as dead gRNAs/gRNAs comprising a dead guide sequence as described herein below. Any of the methods, products, compositions and uses as described herein elsewhere is equally applicable with the dead gRNAs/gRNAs comprising a dead guide sequence as further detailed below. By means of further guidance, the following particular embodiments and embodiments are provided.

[0321] The ability of a dead guide sequence to direct sequence-specific binding of a CRISPR complex to a target sequence may be assessed by any suitable assay. For example, the components of a CRISPR system sufficient to form a CRISPR complex, including the dead guide sequence to be tested, may be provided to a host cell having the corresponding target sequence, such as by transfection with vectors encoding the components of the CRISPR sequence, followed by an assessment of preferential cleavage within the target sequence, such as by Surveyor assay as described herein. Similarly, cleavage of a target polynucleotide sequence may be evaluated in a test tube by providing the target sequence, components of a CRISPR complex, including the dead guide sequence to be tested and a control guide sequence different from the test dead guide sequence, and comparing binding or rate of cleavage at the target sequence between the test and control guide sequence reactions. Other assays are possible and will occur to those skilled in the art. A dead guide sequence may be selected to target any target sequence. In some embodiments, the target sequence is a sequence within a genome of a cell.

[0322] As explained further herein, several structural parameters allow for a proper framework to arrive at such dead guides. Dead guide sequences are shorter than respective guide sequences which result in active Cas9-specific indel formation. Dead guides are 5%, 10%, 20%, 30%, 40%, 50%, shorter than respective guides directed to the same Cas9 leading to active Cas9-specific indel formation.

[0323] As explained below and known in the art, one embodiment of gRNA-Cas9 specificity is the direct repeat sequence, which is to be appropriately linked to such guides. In particular, this implies that the direct repeat sequences are designed dependent on the origin of the Cas9. Thus, structural data available for validated dead guide sequences may be used for designing Cas9 specific equivalents. Structural similarity between, e.g., the orthologous nuclease domains RuvC of two or more Cas9 effector proteins may be used to transfer design equivalent dead guides. Thus, the dead guide herein may be appropriately modified in length and sequence to reflect such Cas9 specific equivalents, allowing for formation of the CRISPR complex and successful binding to the target, while at the same time, not allowing for successful nuclease activity.

[0324] The use of dead guides in the context herein as well as the state of the art provides a surprising and unexpected platform for network biology and/or systems biology in both in vitro, ex vivo, and in vivo applications, allowing for multiplex gene targeting, and in particular bidirectional multiplex gene targeting. Prior to the use of dead guides, addressing multiple targets, for example for activation, repression and/or silencing of gene activity, has been challenging and in some cases not possible. With the use of dead guides, multiple targets, and thus multiple activities, may be addressed, for example, in the same cell, in the same animal, or in the same patient. Such multiplexing may occur at the same time or staggered for a desired timeframe.

[0325] For example, the dead guides now allow for the first time to use gRNA as a means for gene targeting, without the consequence of nuclease activity, while at the same time providing directed means for activation or repression. Guide RNA comprising a dead guide may be modified to further include elements in a manner which allow for activation or repression of gene activity, in particular protein adaptors (e.g. aptamers) as described herein elsewhere allowing for functional placement of gene effectors (e.g. activators or repressors of gene activity). One example is the incorporation of aptamers, as explained herein and in the state of the art. By engineering the gRNA comprising a dead guide to incorporate protein-interacting aptamers (Konermann et al., “Genome-scale transcription activation by an engineered CRISPR-Cas9 complex,” doi: 10.1038/nature14136, incorporated herein by reference), one may assemble a synthetic transcription activation complex consisting of multiple distinct effector domains. Such may be modeled after natural transcription activation processes. For example, an aptamer, which selectively binds an effector (e.g. an activator or repressor; dimerized MS2 bacteriophage coat proteins as fusion proteins with an activator or repressor), or a protein which itself binds an effector (e.g. activator or repressor) may be appended to a dead gRNA tetraloop and/or a stem-loop 2. In the case of MS2, the fusion protein MS2-VP64 binds to the tetraloop and/or stem-loop 2 and in turn mediates transcriptional up-regulation, for example for Neurog2. Other transcriptional activators are, for example, VP64. P65, HSF1, and MyoD1. By mere example of this concept, replacement of the MS2 stem-loops with PP7-interacting stem-loops may be used to recruit repressive elements.

[0326] Thus, one embodiment is a gRNA of the invention which comprises a dead guide, wherein the gRNA further comprises modifications which provide for gene activation or repression, as described herein. The dead gRNA may comprise one or more aptamers. The aptamers may be specific to gene effectors, gene activators or gene repressors. Alternatively, the aptamers may be specific to a protein which in turn is specific to and recruits/binds a specific gene effector, gene activator or gene repressor. If there are multiple sites for activator or repressor recruitment, it is preferred that the sites are specific to either activators or repressors. If there are multiple sites for activator or repressor binding, the sites may be specific to the same activators or same repressors. The sites may also be specific to different activators or different repressors. The gene effectors, gene activators, gene repressors may be present in the form of fusion proteins.

[0327] In an embodiment, the dead gRNA as described herein or the Cas9 CRISPR-Cas complex as described herein includes a non-naturally occurring or engineered composition comprising two or more adaptor proteins, wherein each protein is associated with one or more functional domains and wherein the adaptor protein binds to the distinct RNA sequence(s) inserted into the at least one loop of the dead gRNA.

[0328] Hence, an embodiment provides a non-naturally occurring or engineered composition comprising a guide RNA (gRNA) comprising a dead guide sequence capable of hybridizing to a target sequence in a genomic locus of interest in a cell, wherein the dead guide sequence is as defined herein, a Cas9 comprising at least one or more nuclear localization sequences, wherein the Cas9 optionally comprises at least one mutation wherein at least one loop of the dead gRNA is modified by the insertion of distinct RNA sequence(s) that bind to one or more adaptor proteins, and wherein the adaptor protein is associated with one or more functional domains; or, wherein the dead gRNA is modified to have at least one non-coding functional loop, and wherein the composition comprises two or more adaptor proteins, wherein the each protein is associated with one or more functional domains.

[0329] In certain embodiments, the adaptor protein is a fusion protein comprising the functional domain, the fusion protein optionally comprising a linker between the adaptor protein and the functional domain, the linker optionally including a GlySer linker.

[0330] In certain embodiments, the at least one loop of the dead gRNA is not modified by the insertion of distinct RNA sequence(s) that bind to the two or more adaptor proteins.

[0331] In certain embodiments, the one or more functional domains associated with the adaptor protein is a transcriptional activation domain.

[0332] In certain embodiments, the one or more functional domains associated with the adaptor protein is a transcriptional activation domain comprising VP64, p65, MyoD1, HSF1, RTA or SET7/9.

[0333] In certain embodiments, the one or more functional domains associated with the adaptor protein is a transcriptional repressor domain.

[0334] In certain embodiments, the transcriptional repressor domain is a KRAB domain.

[0335] In certain embodiments, the transcriptional repressor domain is a NuE domain, NcoR domain, SID domain or a SID4X domain.

[0336] In certain embodiments, at least one of the one or more functional domains associated with the adaptor protein have one or more activities comprising methylase activity, demethylase activity, transcription activation activity, transcription repression activity, transcription release factor activity, histone modification activity, DNA integration activity RNA cleavage activity, DNA cleavage activity or nucleic acid binding activity.

[0337] In certain embodiments, the DNA cleavage activity is due to a Fok1 nuclease.

[0338] In certain embodiments, the dead gRNA is modified so that, after dead gRNA binds the adaptor protein and further binds to the Cas9 and target, the functional domain is in a spatial orientation allowing for the functional domain to function in its attributed function.

[0339] In certain embodiments, the at least one loop of the dead gRNA is tetra loop and/or loop2. In certain embodiments, the tetra loop and loop 2 of the dead gRNA are modified by the insertion of the distinct RNA sequence(s).

[0340] In certain embodiments, the insertion of distinct RNA sequence(s) that bind to one or more adaptor proteins is an aptamer sequence. In certain embodiments, the aptamer sequence is two or more aptamer sequences specific to the same adaptor protein. In certain embodiments, the aptamer sequence is two or more aptamer sequences specific to different adaptor protein.

[0341] In certain embodiments, the adaptor protein comprises MS2, PP7, Qβ, F2, GA, fr, JP501, M12, R17, BZ13, JP34, JP500, KUI, M11, MX1, TW18, VK, SP, FI, ID2, NL95, TW19, AP205, φCb5, φCb8r, φCb12r, φCb23r, 7s, PRR1.

[0342] In certain embodiments, the cell is a eukaryotic cell. In certain embodiments, the eukaryotic cell is a mammalian cell, optionally a mouse cell. In certain embodiments, the mammalian cell is a human cell.

[0343] In certain embodiments, a first adaptor protein is associated with a p65 domain and a second adaptor protein is associated with a HSF1 domain.

[0344] In certain embodiments, the composition comprises a Cas9 CRISPR-Cas complex having at least three functional domains, at least one of which is associated with the Cas9 and at least two of which are associated with dead gRNA.

[0345] In certain embodiments, the composition further comprises a second gRNA, wherein the second gRNA is a live gRNA capable of hybridizing to a second target sequence such that a second Cas9 CRISPR-Cas system is directed to a second genomic locus of interest in a cell with detectable indel activity at the second genomic locus resultant from nuclease activity of the Cas9 enzyme of the system.

[0346] In certain embodiments, the composition further comprises a plurality of dead gRNAs and/or a plurality of live gRNAs.

[0347] One embodiment of the invention is to take advantage of the modularity and customizability of the gRNA scaffold to establish a series of gRNA scaffolds with different binding sites (in particular aptamers) for recruiting distinct types of effectors in an orthogonal manner. Again, for matters of example and illustration of the broader concept, replacement of the MS2 stem-loops with PP7-interacting stem-loops may be used to bind/recruit repressive elements, enabling multiplexed bidirectional transcriptional control. Thus, in general, gRNA comprising a dead guide may be employed to provide for multiplex transcriptional control and preferred bidirectional transcriptional control. This transcriptional control is most preferred of genes. For example, one or more gRNA comprising dead guide(s) may be employed in targeting the activation of one or more target genes. At the same time, one or more gRNA comprising dead guide(s) may be employed in targeting the repression of one or more target genes. Such a sequence may be applied in a variety of different combinations, for example the target genes are first repressed and then at an appropriate period other targets are activated, or select genes are repressed at the same time as select genes are activated, followed by further activation and/or repression. As a result, multiple components of one or more biological systems may advantageously be addressed together.

[0348] In an embodiment, the invention provides nucleic acid molecule(s) encoding dead gRNA or the Cas9 CRISPR-Cas complex or the composition as described herein.

[0349] In an embodiment, the invention provides a vector system comprising a nucleic acid molecule encoding dead guide RNA as defined herein. In certain embodiments, the vector system further comprises a nucleic acid molecule(s) encoding Cas9. In certain embodiments, the vector system further comprises a nucleic acid molecule(s) encoding (live) gRNA. In certain embodiments, the nucleic acid molecule or the vector further comprises regulatory element(s) operable in a eukaryotic cell operably linked to the nucleic acid molecule encoding the guide sequence (gRNA) and/or the nucleic acid molecule encoding Cas9 and/or the optional nuclear localization sequence(s).

[0350] In another embodiment, structural analysis may also be used to study interactions between the dead guide and the active Cas9 nuclease that enable DNA binding, but no DNA cutting. In this way amino acids important for nuclease activity of Cas9 are determined. Modification of such amino acids allows for improved Cas9 enzymes used for gene editing.

[0351] A further embodiment is combining the use of dead guides as explained herein with other applications of CRISPR, as explained herein as well as known in the art. For example, gRNA comprising dead guide(s) for targeted multiplex gene activation or repression or targeted multiplex bidirectional gene activation/repression may be combined with gRNA comprising guides which maintain nuclease activity, as explained herein. Such gRNA comprising guides which maintain nuclease activity may or may not further include modifications which allow for repression of gene activity (e.g. aptamers). Such gRNA comprising guides which maintain nuclease activity may or may not further include modifications which allow for activation of gene activity (e.g. aptamers). In such a manner, a further means for multiplex gene control is introduced (e.g. multiplex gene targeted activation without nuclease activity/without indel activity may be provided at the same time or in combination with gene targeted repression with nuclease activity).

[0352] For example, 1) using one or more gRNA (e.g. 1-50, 1-40, 1-30, 1-20, preferably 1-10, more preferably 1-5) comprising dead guide(s) targeted to one or more genes and further modified with appropriate aptamers for the recruitment of gene activators; 2) may be combined with one or more gRNA (e.g. 1-50, 1-40, 1-30, 1-20, preferably 1-10, more preferably 1-5) comprising dead guide(s) targeted to one or more genes and further modified with appropriate aptamers for the recruitment of gene repressors. 1) and/or 2) may then be combined with 3) one or more gRNA (e.g. 1-50, 1-40, 1-30, 1-20, preferably 1-10, more preferably 1-5) targeted to one or more genes. This combination can then be carried out in turn with 1)+2)+3) with 4) one or more gRNA (e.g. 1-50, 1-40, 1-30, 1-20, preferably 1-10, more preferably 1-5) targeted to one or more genes and further modified with appropriate aptamers for the recruitment of gene activators. This combination can then be carried in turn with 1)+2)+3)+4) with 5) one or more gRNA (e.g. 1-50, 1-40, 1-30, 1-20, preferably 1-10, more preferably 1-5) targeted to one or more genes and further modified with appropriate aptamers for the recruitment of gene repressors. As a result various uses and combinations are included in the invention. For example, combination 1)+2); combination 1)+3); combination 2)+3); combination 1)+2)+3); combination 1)+2)+3)+4); combination 1)+3)+4); combination 2)+3)+4); combination 1)+2)+4); combination 1)+2)+3)+4)+5); combination 1)+3)+4)+5); combination 2)+3)+4)+5); combination 1)+2)+4)+5); combination 1)+2)+3)+5); combination 1)+3)+5); combination 2)+3)+5); combination 1)+2)+5).

[0353] In an embodiment, the invention provides an algorithm for designing, evaluating, or selecting a dead guide RNA targeting sequence (dead guide sequence) for guiding a Cas9 CRISPR-Cas system to a target gene locus. In particular, it has been determined that dead guide RNA specificity relates to and can be optimized by varying i) GC content and ii) targeting sequence length. In an embodiment, the invention provides an algorithm for designing or evaluating a dead guide RNA targeting sequence that minimizes off-target binding or interaction of the dead guide RNA. In an embodiment of the invention, the algorithm for selecting a dead guide RNA targeting sequence for directing a CRISPR system to a gene locus in an organism comprises a) locating one or more CRISPR motifs in the gene locus, analyzing the 20 nt sequence downstream of each CRISPR motif by i) determining the GC content of the sequence; and ii) determining whether there are off-target matches of the 15 downstream nucleotides nearest to the CRISPR motif in the genome of the organism, and c) selecting the 15 nucleotide sequence for use in a dead guide RNA if the GC content of the sequence is 70% or less and no off-target matches are identified. In an embodiment, the sequence is selected for a targeting sequence if the GC content is 60% or less. In certain embodiments, the sequence is selected for a targeting sequence if the GC content is 55% or less, 50% or less, 45% or less, 40% or less, 35% or less or 30% or less. In an embodiment, two or more sequences of the gene locus are analyzed and the sequence having the lowest GC content, or the next lowest GC content, or the next lowest GC content is selected. In an embodiment, the sequence is selected for a targeting sequence if no off-target matches are identified in the genome of the organism. In an embodiment, the targeting sequence is selected if no off-target matches are identified in regulatory sequences of the genome.

[0354] In an embodiment, the invention provides a method of selecting a dead guide RNA targeting sequence for directing a functionalized CRISPR system to a gene locus in an organism, which comprises a) locating one or more CRISPR motifs in the gene locus; b) analyzing the 20 nt sequence downstream of each CRISPR motif by: i) determining the GC content of the sequence; and ii) determining whether there are off-target matches of the first 15 nt of the sequence in the genome of the organism; c) selecting the sequence for use in a guide RNA if the GC content of the sequence is 70% or less and no off-target matches are identified. In an embodiment, the sequence is selected if the GC content is 50% or less. In an embodiment, the sequence is selected if the GC content is 40% or less. In an embodiment, the sequence is selected if the GC content is 30% or less. In an embodiment, two or more sequences are analyzed and the sequence having the lowest GC content is selected. In an embodiment, off-target matches are determined in regulatory sequences of the organism. In an embodiment, the gene locus is a regulatory region. An embodiment provides a dead guide RNA comprising the targeting sequence selected according to the aforementioned methods.

[0355] In an embodiment, the invention provides a dead guide RNA for targeting a functionalized CRISPR system to a gene locus in an organism. In an embodiment of the invention, the dead guide RNA comprises a targeting sequence wherein the CG content of the target sequence is 70% or less, and the first 15 nt of the targeting sequence does not match an off-target sequence downstream from a CRISPR motif in the regulatory sequence of another gene locus in the organism. In certain embodiments, the GC content of the targeting sequence 60% or less, 55% or less, 50% or less, 45% or less, 40% or less, 35% or less or 30% or less. In certain embodiments, the GC content of the targeting sequence is from 70% to 60% or from 60% to 50% or from 50% to 40% or from 40% to 30%. In an embodiment, the targeting sequence has the lowest CG content among potential targeting sequences of the locus.

[0356] In an embodiment of the invention, the first 15 nt of the dead guide match the target sequence. In another embodiment, first 14 nt of the dead guide match the target sequence. In another embodiment, the first 13 nt of the dead guide match the target sequence. In another embodiment first 12 nt of the dead guide match the target sequence. In another embodiment, first 11 nt of the dead guide match the target sequence. In another embodiment, the first 10 nt of the dead guide match the target sequence. In an embodiment of the invention the first 15 nt of the dead guide does not match an off-target sequence downstream from a CRISPR motif in the regulatory region of another gene locus. In other embodiments, the first 14 nt, or the first 13 nt of the dead guide, or the first 12 nt of the guide, or the first 11 nt of the dead guide, or the first 10 nt of the dead guide, does not match an off-target sequence downstream from a CRISPR motif in the regulatory region of another gene locus. In other embodiments, the first 15 nt, or 14 nt, or 13 nt, or 12 nt, or 11 nt of the dead guide do not match an off-target sequence downstream from a CRISPR motif in the genome.

[0357] In certain embodiments, the dead guide RNA includes additional nucleotides at the 3′-end that do not match the target sequence. Thus, a dead guide RNA that includes the first 15 nt, or 14 nt, or 13 nt, or 12 nt, or 11 nt downstream of a CRISPR motif can be extended in length at 3′ end to 12 nt, 13 nt, 14 nt, 15 nt, 16 nt, 17 nt, 18 nt, 19 nt, 20 nt, or longer.

[0358] The invention provides a method for directing a Cas9 CRISPR-Cas system, including but not limited to a dead Cas9 (dCas9) or functionalized Cas9 system (which may comprise a functionalized Cas9 or functionalized guide) to a gene locus. In an embodiment, the invention provides a method for selecting a dead guide RNA targeting sequence and directing a functionalized CRISPR system to a gene locus in an organism. In an embodiment, the invention provides a method for selecting a dead guide RNA targeting sequence and effecting gene regulation of a target gene locus by a functionalized Cas9 CRISPR-Cas system. In certain embodiments, the method is used to effect target gene regulation while minimizing off-target effects. In an embodiment, the invention provides a method for selecting two or more dead guide RNA targeting sequences and effecting gene regulation of two or more target gene loci by a functionalized Cas9 CRISPR-Cas system. In certain embodiments, the method is used to effect regulation of two or more target gene loci while minimizing off-target effects.

[0359] In an embodiment, the invention provides a method of selecting a dead guide RNA targeting sequence for directing a functionalized Cas9 to a gene locus in an organism, which comprises: a) locating one or more CRISPR motifs in the gene locus; b) analyzing the sequence downstream of each CRISPR motif by: i) selecting 10 to 15 nt adjacent to the CRISPR motif, ii) determining the GC content of the sequence; and c) selecting the 10 to 15 nt sequence as a targeting sequence for use in a guide RNA if the GC content of the sequence is 40% or more. In an embodiment, the sequence is selected if the GC content is 50% or more. In an embodiment, the sequence is selected if the GC content is 60% or more. In an embodiment, the sequence is selected if the GC content is 70% or more. In an embodiment, two or more sequences are analyzed and the sequence having the highest GC content is selected. In an embodiment, the method further comprises adding nucleotides to the 3′ end of the selected sequence which do not match the sequence downstream of the CRISPR motif. An embodiment provides a dead guide RNA comprising the targeting sequence selected according to the aforementioned methods.

[0360] In an embodiment, the invention provides a dead guide RNA for directing a functionalized CRISPR system to a gene locus in an organism wherein the targeting sequence of the dead guide RNA consists of 10 to 15 nucleotides adjacent to the CRISPR motif of the gene locus, wherein the CG content of the target sequence is 50% or more. In certain embodiments, the dead guide RNA further comprises nucleotides added to the 3′ end of the targeting sequence which do not match the sequence downstream of the CRISPR motif of the gene locus.

[0361] In an embodiment, the invention provides for a single effector to be directed to one or more, or two or more gene loci. In certain embodiments, the effector is associated with a Cas9, and one or more, or two or more selected dead guide RNAs are used to direct the Cas9-associated effector to one or more, or two or more selected target gene loci. In certain embodiments, the effector is associated with one or more, or two or more selected dead guide RNAs, each selected dead guide RNA, when complexed with a Cas9 enzyme, causing its associated effector to localize to the dead guide RNA target. One non-limiting example of such CRISPR systems modulates activity of one or more, or two or more gene loci subject to regulation by the same transcription factor.

[0362] In an embodiment, the invention provides for two or more effectors to be directed to one or more gene loci. In certain embodiments, two or more dead guide RNAs are employed, each of the two or more effectors being associated with a selected dead guide RNA, with each of the two or more effectors being localized to the selected target of its dead guide RNA. One non-limiting example of such CRISPR systems modulates activity of one or more, or two or more gene loci subject to regulation by different transcription factors. Thus, in one non-limiting embodiment, two or more transcription factors are localized to different regulatory sequences of a single gene. In another non-limiting embodiment, two or more transcription factors are localized to different regulatory sequences of different genes. In certain embodiments, one transcription factor is an activator. In certain embodiments, one transcription factor is an inhibitor. In certain embodiments, one transcription factor is an activator and another transcription factor is an inhibitor. In certain embodiments, gene loci expressing different components of the same regulatory pathway are regulated. In certain embodiments, gene loci expressing components of different regulatory pathways are regulated.

[0363] In an embodiment, the invention also provides a method and algorithm for designing and selecting dead guide RNAs that are specific for target DNA cleavage or target binding and gene regulation mediated by an active Cas9 CRISPR-Cas system. In certain embodiments, the Cas9 CRISPR-Cas system provides orthogonal gene control using an active Cas9 which cleaves target DNA at one gene locus while at the same time binds to and promotes regulation of another gene locus.

[0364] In an embodiment, the invention provides an method of selecting a dead guide RNA targeting sequence for directing a functionalized Cas9 to a gene locus in an organism, without cleavage, which comprises a) locating one or more CRISPR motifs in the gene locus; b) analyzing the sequence downstream of each CRISPR motif by i) selecting 10 to 15 nt adjacent to the CRISPR motif, ii) determining the GC content of the sequence, and c) selecting the 10 to 15 nt sequence as a targeting sequence for use in a dead guide RNA if the GC content of the sequence is 30% more, 40% or more. In certain embodiments, the GC content of the targeting sequence is 35% or more, 40% or more, 45% or more, 50% or more, 55% or more, 60% or more, 65% or more, or 70% or more. In certain embodiments, the GC content of the targeting sequence is from 30% to 40% or from 40% to 50% or from 50% to 60% or from 60% to 70%. In an embodiment of the invention, two or more sequences in a gene locus are analyzed and the sequence having the highest GC content is selected.

[0365] In an embodiment of the invention, the portion of the targeting sequence in which GC content is evaluated is 10 to 15 contiguous nucleotides of the 15 target nucleotides nearest to the PAM. In an embodiment of the invention, the portion of the guide in which GC content is considered is the 10 to 11 nucleotides or 11 to 12 nucleotides or 12 to 13 nucleotides or 13, or 14, or 15 contiguous nucleotides of the 15 nucleotides nearest to the PAM.

[0366] In an embodiment, the invention further provides an algorithm for identifying dead guide RNAs which promote CRISPR system gene locus cleavage while avoiding functional activation or inhibition. It is observed that increased GC content in dead guide RNAs of 16 to 20 nucleotides coincides with increased DNA cleavage and reduced functional activation.

[0367] In some embodiments, the efficiency of functionalized Cas9 can be increased by addition of nucleotides to the 3′ end of a guide RNA which do not match a target sequence downstream of the CRISPR motif. For example, of dead guide RNA 11 to 15 nt in length, shorter guides may be less likely to promote target cleavage, but are also less efficient at promoting CRISPR system binding and functional control. In certain embodiments, addition of nucleotides that don't match the target sequence to the 3′ end of the dead guide RNA increase activation efficiency while not increasing undesired target cleavage. In an embodiment, the invention also provides a method and algorithm for identifying improved dead guide RNAs that effectively promote CRISPR system function in DNA binding and gene regulation while not promoting DNA cleavage. Thus, in certain embodiments, the invention provides a dead guide RNA that includes the first 15 nt, or 14 nt, or 13 nt, or 12 nt, or 11 nt downstream of a CRISPR motif and is extended in length at 3′ end by nucleotides that mismatch the target to 12 nt, 13 nt, 14 nt, 15 nt, 16 nt, 17 nt, 18 nt, 19 nt, 20 nt, or longer.

[0368] In an embodiment, the invention provides a method for effecting selective orthogonal gene control. As will be appreciated from the disclosure herein, dead guide selection according to the invention, taking into account guide length and GC content, provides effective and selective transcription control by a functional Cas9 CRISPR-Cas system, for example to regulate transcription of a gene locus by activation or inhibition and minimize off-target effects. Accordingly, by providing effective regulation of individual target loci, the invention also provides effective orthogonal regulation of two or more target loci.

[0369] In certain embodiments, orthogonal gene control is by activation or inhibition of two or more target loci. In certain embodiments, orthogonal gene control is by activation or inhibition of one or more target locus and cleavage of one or more target locus.

[0370] In one embodiment, the invention provides a cell comprising a non-naturally occurring Cas9 CRISPR-Cas system comprising one or more dead guide RNAs disclosed or made according to a method or algorithm described herein wherein the expression of one or more gene products has been altered. In an embodiment of the invention, the expression in the cell of two or more gene products has been altered. The invention also provides a cell line from such a cell.

[0371] In one embodiment, the invention provides a multicellular organism comprising one or more cells comprising a non-naturally occurring Cas9 CRISPR-Cas system comprising one or more dead guide RNAs disclosed or made according to a method or algorithm described herein. In one embodiment, the invention provides a product from a cell, cell line, or multicellular organism comprising a non-naturally occurring Cas9 CRISPR-Cas system comprising one or more dead guide RNAs disclosed or made according to a method or algorithm described herein.

[0372] A further embodiment of this invention is the use of gRNA comprising dead guide(s) as described herein, optionally in combination with gRNA comprising guide(s) as described herein or in the state of the art, in combination with systems e.g. cells, transgenic animals, transgenic mice, inducible transgenic animals, inducible transgenic mice) which are engineered for either overexpression of Cas9 or preferably knock in Cas9. As a result, a single system (e.g. transgenic animal, cell) can serve as a basis for multiplex gene modifications in systems/network biology. On account of the dead guides, this is now possible in both in vitro, ex vivo, and in vivo.

[0373] For example, once the Cas9 is provided for, one or more dead gRNAs may be provided to direct multiplex gene regulation, and preferably multiplex bidirectional gene regulation. The one or more dead gRNAs may be provided in a spatially and temporally appropriate manner if necessary or desired (for example tissue specific induction of Cas9 expression). On account that the transgenic/inducible Cas9 is provided for (e.g. expressed) in the cell, tissue, animal of interest, both gRNAs comprising dead guides or gRNAs comprising guides are equally effective. In the same manner, a further embodiment of this invention is the use of gRNA comprising dead guide(s) as described herein, optionally in combination with gRNA comprising guide(s) as described herein or in the state of the art, in combination with systems (e.g. cells, transgenic animals, transgenic mice, inducible transgenic animals, inducible transgenic mice) which are engineered for knockout Cas9 CRISPR-Cas.

[0374] As a result, the combination of dead guides as described herein with CRISPR applications described herein and CRISPR applications known in the art results in a highly efficient and accurate means for multiplex screening of systems (e.g. network biology). Such screening allows, for example, identification of specific combinations of gene activities for identifying genes responsible for diseases (e.g. on/off combinations), in particular gene related diseases. A preferred application of such screening is cancer. In the same manner, screening for treatment for such diseases is included in the invention. Cells or animals may be exposed to aberrant conditions resulting in disease or disease like effects. Candidate compositions may be provided and screened for an effect in the desired multiplex environment. For example, a patient's cancer cells may be screened for which gene combinations will cause them to die, and then use this information to establish appropriate therapies.

[0375] In one embodiment, the invention provides a kit comprising one or more of the components described herein. The kit may include dead guides as described herein with or without guides as described herein.

[0376] The structural information provided herein allows for interrogation of dead gRNA interaction with the target DNA and the Cas9 permitting engineering or alteration of dead gRNA structure to optimize functionality of the entire Cas9 CRISPR-Cas system. For example, loops of the dead gRNA may be extended, without colliding with the Cas9 protein by the insertion of adaptor proteins that can bind to RNA. These adaptor proteins can further recruit effector proteins or fusions which comprise one or more functional domains.

[0377] In some preferred embodiments, the functional domain is a transcriptional activation domain, preferably VP64. In some embodiments, the functional domain is a transcription repression domain, preferably KRAB. In some embodiments, the transcription repression domain is SID, or concatemers of SID (e.g. SID4X). In some embodiments, the functional domain is an epigenetic modifying domain, such that an epigenetic modifying enzyme is provided. In some embodiments, the functional domain is an activation domain, which may be the P65 activation domain.

[0378] An embodiment of the invention is that the above elements are comprised in a single composition or comprised in individual compositions. These compositions may advantageously be applied to a host to elicit a functional effect on the genomic level.

[0379] In general, the dead gRNA are modified in a manner that provides specific binding sites (e.g. aptamers) for adapter proteins comprising one or more functional domains (e.g. via fusion protein) to bind to. The modified dead gRNA are modified such that once the dead gRNA forms a CRISPR complex (i.e. Cas9 binding to dead gRNA and target) the adapter proteins bind and, the functional domain on the adapter protein is positioned in a spatial orientation which is advantageous for the attributed function to be effective. For example, if the functional domain is a transcription activator (e.g. VP64 or p65), the transcription activator is placed in a spatial orientation which allows it to affect the transcription of the target. Likewise, a transcription repressor will be advantageously positioned to affect the transcription of the target and a nuclease (e.g. Fok1) will be advantageously positioned to cleave or partially cleave the target.

[0380] The skilled person will understand that modifications to the dead gRNA which allow for binding of the adapter+functional domain but not proper positioning of the adapter+functional domain (e.g. due to steric hindrance within the three dimensional structure of the CRISPR complex) are modifications which are not intended. The one or more modified dead gRNA may be modified at the tetra loop, the stem loop 1, stem loop 2, or stem loop 3, as described herein, preferably at either the tetra loop or stem loop 2, and most preferably at both the tetra loop and stem loop 2.

[0381] As explained herein the functional domains may be, for example, one or more domains from the group consisting of methylase activity, demethylase activity, transcription activation activity, transcription repression activity, transcription release factor activity, histone modification activity, RNA cleavage activity, DNA cleavage activity, nucleic acid binding activity, and molecular switches (e.g. light inducible). In some cases, it is advantageous that additionally at least one NLS is provided. In some instances, it is advantageous to position the NLS at the N terminus. When more than one functional domain is included, the functional domains may be the same or different.

[0382] The dead gRNA may be designed to include multiple binding recognition sites (e.g. aptamers) specific to the same or different adapter protein. The dead gRNA may be designed to bind to the promoter region −1000-+1 nucleic acids upstream of the transcription start site (i.e. TSS), preferably −200 nucleic acids. This positioning improves functional domains which affect gene activation (e.g. transcription activators) or gene inhibition (e.g. transcription repressors). The modified dead gRNA may be one or more modified dead gRNAs targeted to one or more target loci (e.g. at least 1 gRNA, at least 2 gRNA, at least 5 gRNA, at least 10 gRNA, at least 20 gRNA, at least 30 gRNA, at least 50 gRNA) comprised in a composition.

[0383] The adaptor protein may be any number of proteins that binds to an aptamer or recognition site introduced into the modified dead gRNA and which allows proper positioning of one or more functional domains, once the dead gRNA has been incorporated into the CRISPR complex, to affect the target with the attributed function. As explained in detail in this application such may be coat proteins, preferably bacteriophage coat proteins. The functional domains associated with such adaptor proteins (e.g. in the form of fusion protein) may include, for example, one or more domains from the group consisting of methylase activity, demethylase activity, transcription activation activity, transcription repression activity, transcription release factor activity, histone modification activity, RNA cleavage activity, DNA cleavage activity, nucleic acid binding activity, and molecular switches (e.g. light inducible). Preferred domains are Fok1, VP64, P65, HSF1, MyoD1. In the event that the functional domain is a transcription activator or transcription repressor it is advantageous that additionally at least an NLS is provided and preferably at the N terminus. When more than one functional domain is included, the functional domains may be the same or different. The adaptor protein may utilize known linkers to attach such functional domains.

[0384] Thus, the modified dead gRNA, the (inactivated) Cas9 (with or without functional domains), and the binding protein with one or more functional domains, may each individually be comprised in a composition and administered to a host individually or collectively. Alternatively, these components may be provided in a single composition for administration to a host. Administration to a host may be performed via viral vectors known to the skilled person or described herein for delivery to a host (e.g. lentiviral vector, adenoviral vector, AAV vector). As explained herein, use of different selection markers (e.g. for lentiviral gRNA selection) and concentration of gRNA (e.g. dependent on whether multiple gRNAs are used) may be advantageous for eliciting an improved effect.

[0385] On the basis of this concept, several variations are appropriate to elicit a genomic locus event, including DNA cleavage, gene activation, or gene deactivation. Using the provided compositions, the person skilled in the art can advantageously and specifically target single or multiple loci with the same or different functional domains to elicit one or more genomic locus events. The compositions may be applied in a wide variety of methods for screening in libraries in cells and functional modeling in vivo (e.g. gene activation of lincRNA and identification of function; gain-of-function modeling; loss-of-function modeling; the use the compositions of the invention to establish cell lines and transgenic animals for optimization and screening purposes).

[0386] The current invention comprehends the use of the compositions of the current invention to establish and utilize conditional or inducible CRISPR transgenic cell/animals, which are not believed prior to the present invention or application. For example, the target cell comprises Cas9 conditionally or inducibly (e.g. in the form of Cre dependent constructs) and/or the adapter protein conditionally or inducibly and, on expression of a vector introduced into the target cell, the vector expresses that which induces or gives rise to the condition of Cas9 expression and/or adaptor expression in the target cell. By applying the teaching and compositions of the current invention with the known method of creating a CRISPR complex, inducible genomic events affected by functional domains are also an embodiment of the current invention. One example of this is the creation of a CRISPR knock-in/conditional transgenic animal (e.g. mouse comprising e.g. a Lox-Stop-polyA-Lox (LSL) cassette) and subsequent delivery of one or more compositions providing one or more modified dead gRNA (e.g. −200 nucleotides to TSS of a target gene of interest for gene activation purposes) as described herein (e.g. modified dead gRNA with one or more aptamers recognized by coat proteins, e.g. MS2), one or more adapter proteins as described herein (MS2 binding protein linked to one or more VP64) and means for inducing the conditional animal (e.g. Cre recombinase for rendering Cas9 expression inducible). Alternatively, the adaptor protein may be provided as a conditional or inducible element with a conditional or inducible Cas9 to provide an effective model for screening purposes, which advantageously only requires minimal design and administration of specific dead gRNAs for a broad number of applications.

[0387] In another embodiment the dead guides are further modified to improve specificity. Protected dead guides may be synthesized, whereby secondary structure is introduced into the 3′ end of the dead guide to improve its specificity. A protected guide RNA (pgRNA) comprises a guide sequence capable of hybridizing to a target sequence in a genomic locus of interest in a cell and a protector strand, wherein the protector strand is optionally complementary to the guide sequence and wherein the guide sequence may in part be hybridizable to the protector strand. The pgRNA optionally includes an extension sequence. The thermodynamics of the pgRNA-target DNA hybridization is determined by the number of bases complementary between the guide RNA and target DNA. By employing ‘thermodynamic protection’, specificity of dead gRNA can be improved by adding a protector sequence. For example, one method adds a complementary protector strand of varying lengths to the 3′ end of the guide sequence within the dead gRNA. As a result, the protector strand is bound to at least a portion of the dead gRNA and provides for a protected gRNA (pgRNA). In turn, the dead gRNA references herein may be easily protected using the described embodiments, resulting in pgRNA. The protector strand can be either a separate RNA transcript or strand or a chimeric version joined to the 3′ end of the dead gRNA guide sequence.

### Tandem Guides and Uses in a Multiplex (Tandem) Targeting Approach

[0388] The inventors have shown that CRISPR enzymes as defined herein can employ more than one RNA guide without losing activity. This enables the use of the CRISPR enzymes, systems or complexes as defined herein for targeting multiple DNA targets, genes or gene loci, with a single enzyme, system or complex as defined herein. The guide RNAs may be tandemly arranged, optionally separated by a nucleotide sequence such as a direct repeat as defined herein. The position of the different guide RNAs is the tandem does not influence the activity. It is noted that the terms “CRISPR-Cas system”, “CRISP-Cas complex” “CRISPR complex” and “CRISPR system” are used interchangeably. Also, the terms “CRISPR enzyme”, “Cas enzyme”, or “CRISPR-Cas enzyme”, can be used interchangeably. In preferred embodiments, said CRISPR enzyme, CRISP-Cas enzyme or Cas enzyme is Cas9, or any one of the modified or mutated variants thereof described herein elsewhere.

[0389] In one embodiment, the invention provides a non-naturally occurring or engineered CRISPR enzyme, preferably a class 2 CRISPR enzyme, preferably a Type V or VI CRISPR enzyme as described herein, such as without limitation Cas9 as described herein elsewhere, used for tandem or multiplex targeting. It is to be understood that any of the CRISPR (or CRISPR-Cas or Cas) enzymes, complexes, or systems according to the invention as described herein elsewhere may be used in such an approach. Any of the methods, products, compositions and uses as described herein elsewhere are equally applicable with the multiplex or tandem targeting approach further detailed below. By means of further guidance, the following particular embodiments and embodiments are provided.

[0390] In one embodiment, the invention provides for the use of a Cas9 enzyme, complex or system as defined herein for targeting multiple gene loci. In one embodiment, this can be established by using multiple (tandem or multiplex) guide RNA (gRNA) sequences.

[0391] In one embodiment, the invention provides methods for using one or more elements of a Cas9 enzyme, complex or system as defined herein for tandem or multiplex targeting, wherein said CRISP system comprises multiple guide RNA sequences. Preferably, said gRNA sequences are separated by a nucleotide sequence, such as a direct repeat as defined herein elsewhere.

[0392] The Cas9 enzyme, system or complex as defined herein provides an effective means for modifying multiple target polynucleotides. The Cas9 enzyme, system or complex as defined herein has a wide variety of utility including modifying (e.g., deleting, inserting, translocating, inactivating, activating) one or more target polynucleotides in a multiplicity of cell types. As such the Cas9 enzyme, system or complex as defined herein of the invention has a broad spectrum of applications in, e.g., gene therapy, drug screening, disease diagnosis, and prognosis, including targeting multiple gene loci within a single CRISPR system.

[0393] In one embodiment, the invention provides a Cas9 enzyme, system or complex as defined herein, i.e. a Cas9 CRISPR-Cas complex having a Cas9 protein having at least one destabilization domain associated therewith, and multiple guide RNAs that target multiple nucleic acid molecules such as DNA molecules, whereby each of said multiple guide RNAs specifically targets its corresponding nucleic acid molecule, e.g., DNA molecule. Each nucleic acid molecule target, e.g., DNA molecule can encode a gene product or encompass a gene locus. Using multiple guide RNAs hence enables the targeting of multiple gene loci or multiple genes. In some embodiments the Cas9 enzyme may cleave the DNA molecule encoding the gene product. In some embodiments expression of the gene product is altered. The Cas9 protein and the guide RNAs do not naturally occur together. The invention comprehends the guide RNAs comprising tandemly arranged guide sequences. The invention further comprehends coding sequences for the Cas9 protein being codon optimized for expression in a eukaryotic cell. In a preferred embodiment the eukaryotic cell is a mammalian cell, a plant cell or a yeast cell and in a more preferred embodiment the mammalian cell is a human cell. Expression of the gene product may be decreased. The Cas9 enzyme may form part of a CRISPR system or complex, which further comprises tandemly arranged guide RNAs (gRNAs) comprising a series of 2, 3, 4, 5, 6, 7, 8, 9, 10, 15, 25, 25, 30, or more than 30 guide sequences, each capable of specifically hybridizing to a target sequence in a genomic locus of interest in a cell. In some embodiments, the functional Cas9 CRISPR system or complex binds to the multiple target sequences. In some embodiments, the functional CRISPR system or complex may edit the multiple target sequences, e.g., the target sequences may comprise a genomic locus, and in some embodiments, there may be an alteration of gene expression. In some embodiments, the functional CRISPR system or complex may comprise further functional domains. In some embodiments, the invention provides a method for altering or modifying expression of multiple gene products. The method may comprise introducing into a cell containing said target nucleic acids, e.g., DNA molecules, or containing and expressing target nucleic acid, e.g., DNA molecules; for instance, the target nucleic acids may encode gene products or provide for expression of gene products (e.g., regulatory sequences).

[0394] In preferred embodiments, the CRISPR enzyme used for multiplex targeting is Cas9, or the CRISPR system or complex comprises Cas9. In some embodiments, the CRISPR enzyme used for multiplex targeting is AsCas9, or the CRISPR system or complex used for multiplex targeting comprises an AsCas9. In some embodiments, the CRISPR enzyme is an LbCas9, or the CRISPR system or complex comprises LbCas9. In some embodiments, the Cas9 enzyme used for multiplex targeting cleaves both strands of DNA to produce a double strand break (DSB). In some embodiments, the CRISPR enzyme used for multiplex targeting is a nickase. In some embodiments, the Cas9 enzyme used for multiplex targeting is a dual nickase. In some embodiments, the Cas9 enzyme used for multiplex targeting is a Cas9 enzyme such as a DD Cas9 enzyme as defined herein elsewhere.

[0395] In some general embodiments, the Cas9 enzyme used for multiplex targeting is associated with one or more functional domains. In some more specific embodiments, the CRISPR enzyme used for multiplex targeting is a deadCas9 as defined herein elsewhere.

[0396] In an embodiment, the present invention provides a means for delivering the Cas9 enzyme, system or complex for use in multiple targeting as defined herein or the polynucleotides defined herein. Non-limiting examples of such delivery means are e.g. particle(s) delivering component(s) of the complex, vector(s) comprising the polynucleotide(s) discussed herein (e.g., encoding the CRISPR enzyme, providing the nucleotides encoding the CRISPR complex). In some embodiments, the vector may be a plasmid or a viral vector such as AAV, or lentivirus. Transient transfection with plasmids, e.g., into HEK cells may be advantageous, especially given the size limitations of AAV and that while Cas9 fits into AAV, one may reach an upper limit with additional guide RNAs.

[0397] Also provided is a model that constitutively expresses the Cas9 enzyme, complex or system as used herein for use in multiplex targeting. The organism may be transgenic and may have been transfected with the present vectors or may be the offspring of an organism so transfected. In a further embodiment, the present invention provides compositions comprising the CRISPR enzyme, system and complex as defined herein or the polynucleotides or vectors described herein. Also provides are Cas9 CRISPR systems or complexes comprising multiple guide RNAs, preferably in a tandemly arranged format. Said different guide RNAs may be separated by nucleotide sequences such as direct repeats.

[0398] Also provided is a method of treating a subject, e.g., a subject in need thereof, comprising inducing gene editing by transforming the subject with the polynucleotide encoding the Cas9 CRISPR system or complex or any of polynucleotides or vectors described herein and administering them to the subject. A suitable repair template may also be provided, for example delivered by a vector comprising said repair template. Also provided is a method of treating a subject, e.g., a subject in need thereof, comprising inducing transcriptional activation or repression of multiple target gene loci by transforming the subject with the polynucleotides or vectors described herein, wherein said polynucleotide or vector encodes or comprises the Cas9 enzyme, complex or system comprising multiple guide RNAs, preferably tandemly arranged. Where any treatment is occurring ex vivo, for example in a cell culture, then it will be appreciated that the term ‘subject’ may be replaced by the phrase “cell or cell culture.”

[0399] Compositions comprising Cas9 enzyme, complex or system comprising multiple guide RNAs, preferably tandemly arranged, or the polynucleotide or vector encoding or comprising said Cas9 enzyme, complex or system comprising multiple guide RNAs, preferably tandemly arranged, for use in the methods of treatment as defined herein elsewhere are also provided. A kit of parts may be provided including such compositions. Use of said composition in the manufacture of a medicament for such methods of treatment are also provided. Use of a Cas9 CRISPR system in screening is also provided by the present invention, e.g., gain of function screens. Cells which are artificially forced to overexpress a gene are be able to down regulate the gene over time (re-establishing equilibrium) e.g. by negative feedback loops. By the time the screen starts the unregulated gene might be reduced again. Using an inducible Cas9 activator allows one to induce transcription right before the screen and therefore minimizes the chance of false negative hits. Accordingly, by use of the instant invention in screening, e.g., gain of function screens, the chance of false negative results may be minimized.

[0400] In one embodiment, the invention provides an engineered, non-naturally occurring CRISPR system comprising a Cas9 protein and multiple guide RNAs that each specifically target a DNA molecule encoding a gene product in a cell, whereby the multiple guide RNAs each target their specific DNA molecule encoding the gene product and the Cas9 protein cleaves the target DNA molecule encoding the gene product, whereby expression of the gene product is altered; and, wherein the CRISPR protein and the guide RNAs do not naturally occur together. The invention comprehends the multiple guide RNAs comprising multiple guide sequences, preferably separated by a nucleotide sequence such as a direct repeat and optionally fused to a tracr sequence. In an embodiment of the invention, the CRISPR protein is a type V or VI CRISPR-Cas protein and in a more preferred embodiment the CRISPR protein is a Cas9 protein. The invention further comprehends a Cas9 protein being codon optimized for expression in a eukaryotic cell. In a preferred embodiment, the eukaryotic cell is a mammalian cell and in a more preferred embodiment the mammalian cell is a human cell. In a further embodiment of the invention, the expression of the gene product is decreased.

[0401] In another embodiment, the invention provides an engineered, non-naturally occurring vector system comprising one or more vectors comprising a first regulatory element operably linked to the multiple Cas9 CRISPR system guide RNAs that each specifically target a DNA molecule encoding a gene product and a second regulatory element operably linked coding for a CRISPR protein. Both regulatory elements may be located on the same vector or on different vectors of the system. The multiple guide RNAs target the multiple DNA molecules encoding the multiple gene products in a cell and the CRISPR protein may cleave the multiple DNA molecules encoding the gene products (it may cleave one or both strands or have substantially no nuclease activity), whereby expression of the multiple gene products is altered; and, wherein the CRISPR protein and the multiple guide RNAs do not naturally occur together. In a preferred embodiment, the CRISPR protein is Cas9 protein, optionally codon optimized for expression in a eukaryotic cell. In a preferred embodiment, the eukaryotic cell is a mammalian cell, a plant cell or a yeast cell and in a more preferred embodiment the mammalian cell is a human cell. In a further embodiment of the invention, the expression of each of the multiple gene products is altered, preferably decreased.

[0402] In one embodiment, the invention provides a vector system comprising one or more vectors. In some embodiments, the system comprises (a) a first regulatory element operably linked to a direct repeat sequence and one or more insertion sites for inserting one or more guide sequences up- or downstream (whichever applicable) of the direct repeat sequence, wherein when expressed, the one or more guide sequence(s) direct(s) sequence-specific binding of the CRISPR complex to the one or more target sequence(s) in a eukaryotic cell, wherein the CRISPR complex comprises a Cas9 enzyme complexed with the one or more guide sequence(s) that is hybridized to the one or more target sequence(s); and (b) a second regulatory element operably linked to an enzyme-coding sequence encoding said Cas9 enzyme, preferably comprising at least one nuclear localization sequence and/or at least one NES; wherein components (a) and (b) are located on the same or different vectors of the system. Where applicable, a tracr sequence may also be provided. In some embodiments, component (a) further comprises two or more guide sequences operably linked to the first regulatory element, wherein when expressed, each of the two or more guide sequences direct sequence specific binding of a Cas9 CRISPR complex to a different target sequence in a eukaryotic cell. In some embodiments, the CRISPR complex comprises one or more nuclear localization sequences and/or one or more NES of sufficient strength to drive accumulation of said Cas9 CRISPR complex in a detectable amount in or out of the nucleus of a eukaryotic cell. In some embodiments, the first regulatory element is a polymerase III promoter. In some embodiments, the second regulatory element is a polymerase II promoter. In some embodiments, each of the guide sequences is at least 16, 17, 18, 19, 20, 25 nucleotides, or between 16-30, or between 16-25, or between 16-20 nucleotides in length.

[0403] Recombinant expression vectors can comprise the polynucleotides encoding the Cas9 enzyme, system or complex for use in multiple targeting as defined herein in a form suitable for expression of the nucleic acid in a host cell, which means that the recombinant expression vectors include one or more regulatory elements, which may be selected on the basis of the host cells to be used for expression, that is operatively-linked to the nucleic acid sequence to be expressed.

[0404] In some embodiments, a host cell is transiently or non-transiently transfected with one or more vectors comprising the polynucleotides encoding the Cas9 enzyme, system or complex for use in multiple targeting as defined herein. In some embodiments, a cell is transfected as it naturally occurs in a subject. In some embodiments, a cell that is transfected is taken from a subject. In some embodiments, the cell is derived from cells taken from a subject, such as a cell line. A wide variety of cell lines for tissue culture are known in the art and exemplified herein elsewhere. Cell lines are available from a variety of sources known to those with skill in the art (see, e.g., the American Type Culture Collection (ATCC) (Manassas, Va.)). In some embodiments, a cell transfected with one or more vectors comprising the polynucleotides encoding the Cas9 enzyme, system or complex for use in multiple targeting as defined herein is used to establish a new cell line comprising one or more vector-derived sequences. In some embodiments, a cell transiently transfected with the components of a Cas9 CRISPR system or complex for use in multiple targeting as described herein (such as by transient transfection of one or more vectors, or transfection with RNA), and modified through the activity of a Cas9 CRISPR system or complex, is used to establish a new cell line comprising cells containing the modification but lacking any other exogenous sequence. In some embodiments, cells transiently or non-transiently transfected with one or more vectors comprising the polynucleotides encoding the Cas9 enzyme, system or complex for use in multiple targeting as defined herein, or cell lines derived from such cells are used in assessing one or more test compounds.

[0405] The term “regulatory element” is as defined herein elsewhere.

[0406] Advantageous vectors include lentiviruses and adeno-associated viruses, and types of such vectors can also be selected for targeting particular types of cells.

[0407] In one embodiment, the invention provides a eukaryotic host cell comprising (a) a first regulatory element operably linked to a direct repeat sequence and one or more insertion sites for inserting one or more guide RNA sequences up- or downstream (whichever applicable) of the direct repeat sequence, wherein when expressed, the guide sequence(s) direct(s) sequence-specific binding of the Cas9 CRISPR complex to the respective target sequence(s) in a eukaryotic cell, wherein the Cas9 CRISPR complex comprises a Cas9 enzyme complexed with the one or more guide sequence(s) that is hybridized to the respective target sequence(s); and/or (b) a second regulatory element operably linked to an enzyme-coding sequence encoding said Cas9 enzyme comprising preferably at least one nuclear localization sequence and/or NES. In some embodiments, the host cell comprises components (a) and (b). Where applicable, a tracr sequence may also be provided. In some embodiments, component (a), component (b), or components (a) and (b) are stably integrated into a genome of the host eukaryotic cell. In some embodiments, component (a) further comprises two or more guide sequences operably linked to the first regulatory element, and optionally separated by a direct repeat, wherein when expressed, each of the two or more guide sequences direct sequence specific binding of a Cas9 CRISPR complex to a different target sequence in a eukaryotic cell. In some embodiments, the Cas9 enzyme comprises one or more nuclear localization sequences and/or nuclear export sequences or NES of sufficient strength to drive accumulation of said CRISPR enzyme in a detectable amount in and/or out of the nucleus of a eukaryotic cell.

[0408] In some embodiments, the Cas9 enzyme is a type V or VI CRISPR system enzyme. In some embodiments, the Cas9 enzyme is a Cas9 enzyme. In some embodiments, the Cas9 enzyme is derived from Francisella tularensis 1, Francisella tularensis subsp. novicida, Prevotella albensis, Lachnospiraceae bacterium MC2017 1, Butyrivibrio proteoclasticus, Peregrinibacteria bacterium GW2011_GWA2_33_10, Parcubacteria bacterium GW2011_GWC2_44_17, Smithella sp. SCADC, Acidaminococcus sp. BV3L6, Lachnospiraceae bacterium MA2020, Candidatus Methanoplasma termitum, Eubacterium eligens, Moraxella bovoculi 237, Leptospira inadai, Lachnospiraceae bacterium ND2006, Porphyromonas crevioricanis 3, Prevotella disiens, or Porphyromonas macacae Cas9, and may include further alterations or mutations of the Cas9 as defined herein elsewhere, and can be a chimeric Cas9. In some embodiments, the Cas9 enzyme is codon-optimized for expression in a eukaryotic cell. In some embodiments, the CRISPR enzyme directs cleavage of one or two strands at the location of the target sequence. In some embodiments, the first regulatory element is a polymerase III promoter. In some embodiments, the second regulatory element is a polymerase II promoter. In some embodiments, the one or more guide sequence(s) is (are each) at least 16, 17, 18, 19, 20, 25 nucleotides, or between 16-30, or between 16-25, or between 16-20 nucleotides in length. When multiple guide RNAs are used, they are preferably separated by a direct repeat sequence.

[0409] In one embodiment, the invention provides a method of modifying multiple target polynucleotides in a host cell such as a eukaryotic cell. In some embodiments, the method comprises allowing a Cas9 CRISPR complex to bind to multiple target polynucleotides, e.g., to effect cleavage of said multiple target polynucleotides, thereby modifying multiple target polynucleotides, wherein the Cas9 CRISPR complex comprises a Cas9 enzyme complexed with multiple guide sequences each of the being hybridized to a specific target sequence within said target polynucleotide, wherein said multiple guide sequences are linked to a direct repeat sequence. Where applicable, a tracr sequence may also be provided (e.g. to provide a single guide RNA, sgRNA). In some embodiments, said cleavage comprises cleaving one or two strands at the location of each of the target sequence by said Cas9 enzyme. In some embodiments, said cleavage results in decreased transcription of the multiple target genes. In some embodiments, the method further comprises repairing one or more of said cleaved target polynucleotide by homologous recombination with an exogenous template polynucleotide, wherein said repair results in a mutation comprising an insertion, deletion, or substitution of one or more nucleotides of one or more of said target polynucleotides. In some embodiments, said mutation results in one or more amino acid changes in a protein expressed from a gene comprising one or more of the target sequence(s). In some embodiments, the method further comprises delivering one or more vectors to said eukaryotic cell, wherein the one or more vectors drive expression of one or more of: the Cas9 enzyme and the multiple guide RNA sequence linked to a direct repeat sequence. Where applicable, a tracr sequence may also be provided. In some embodiments, said vectors are delivered to the eukaryotic cell in a subject. In some embodiments, said modifying takes place in said eukaryotic cell in a cell culture. In some embodiments, the method further comprises isolating said eukaryotic cell from a subject prior to said modifying. In some embodiments, the method further comprises returning said eukaryotic cell and/or cells derived therefrom to said subject.

[0410] In one embodiment, the invention provides a method of modifying expression of multiple polynucleotides in a eukaryotic cell. In some embodiments, the method comprises allowing a Cas9 CRISPR complex to bind to multiple polynucleotides such that said binding results in increased or decreased expression of said polynucleotides; wherein the Cas9 CRISPR complex comprises a Cas9 enzyme complexed with multiple guide sequences each specifically hybridized to its own target sequence within said polynucleotide, wherein said guide sequences are linked to a direct repeat sequence. Where applicable, a tracr sequence may also be provided. In some embodiments, the method further comprises delivering one or more vectors to said eukaryotic cells, wherein the one or more vectors drive expression of one or more of: the Cas9 enzyme and the multiple guide sequences linked to the direct repeat sequences. Where applicable, a tracr sequence may also be provided.

[0411] In one embodiment, the invention provides a recombinant polynucleotide comprising multiple guide RNA sequences up- or downstream (whichever applicable) of a direct repeat sequence, wherein each of the guide sequences when expressed directs sequence-specific binding of a Cas9 CRISPR complex to its corresponding target sequence present in a eukaryotic cell. In some embodiments, the target sequence is a viral sequence present in a eukaryotic cell. Where applicable, a tracr sequence may also be provided. In some embodiments, the target sequence is a proto-oncogene or an oncogene.

[0412] Embodiments of the invention encompass a non-naturally occurring or engineered composition that may comprise a guide RNA (gRNA) comprising a guide sequence capable of hybridizing to a target sequence in a genomic locus of interest in a cell and a Cas9 enzyme as defined herein that may comprise at least one or more nuclear localization sequences.

[0413] An embodiment of the invention encompasses methods of modifying a genomic locus of interest to change gene expression in a cell by introducing into the cell any of the compositions described herein.

[0414] An embodiment of the invention is that the above elements are comprised in a single composition or comprised in individual compositions. These compositions may advantageously be applied to a host to elicit a functional effect on the genomic level.

### Engineered Cells and Organisms Expressing Said Engineered AAV Capsids

[0415] Described herein are engineered cells that can include one or more of the engineered AAV capsid polynucleotides, polypeptides, vectors, and/or vector systems. In some embodiments, one or more of the engineered AAV capsid polynucleotides can be expressed in the engineered cells. In some embodiments, the engineered cells can be capable of producing engineered AAV capsid proteins and/or engineered AAV capsid particles that are described elsewhere herein. Also described herein are modified or engineered organisms that can include one or more engineered cells described herein. The engineered cells can be engineered to express a cargo molecule (e.g. a cargo polynucleotide) dependently or independently of an engineered AAV capsid polynucleotide as described elsewhere herein.

[0416] A wide variety of animals, plants, algae, fungi, yeast, etc. and animal, plant, algae, fungus, yeast cell or tissue systems may be engineered to express one or more nucleic acid constructs of the engineered AAV capsid system described herein using various transformation methods mentioned elsewhere herein. This can produce organisms that can produce engineered AAV capsid particles, such as for production purposes, engineered AAV capsid design and/or generation, and/or model organisms. In some embodiments, the polynucleotide(s) encoding one or more components of the engineered AAV capsid system described herein can be stably or transiently incorporated into one or more cells of a plant, animal, algae, fungus, and/or yeast or tissue system. In some embodiments, one or more of engineered AAV capsid system polynucleotides are genomically incorporated into one or more cells of a plant, animal, algae, fungus, and/or yeast or tissue system. Further embodiments of the modified organisms and systems are described elsewhere herein. In some embodiments, one or more components of the engineered AAV capsid system described herein are expressed in one or more cells of the plant, animal, algae, fungus, yeast, or tissue systems.

### Engineered Cells

[0417] Described herein are various embodiments of engineered cells that can include one or more of the engineered AAV capsid system polynucleotides, polypeptides, vectors, and/or vector systems described elsewhere herein. In some embodiments, the cells can express one or more of the engineered AAV capsid polynucleotides and can produce one or more engineered AAV capsid particles, which are described in greater detail herein. Such cells are also referred to herein as “producer cells”. It will be appreciated that these engineered cells are different from “modified cells” described elsewhere herein in that the modified cells are not necessarily producer cells (i.e. they do not make engineered GTA delivery particles) unless they include one or more of the engineered AAV capsid polynucleotides, engineered AAV capsid vectors or other vectors described herein that render the cells capable of producing an engineered AAV capsid particle. Modified cells can be recipient cells of an engineered AAV capsid particles and can, in some embodiments, be modified by the engineered AAV capsid particle(s) and/or a cargo polynucleotide delivered to the recipient cell. Modified cells are discussed in greater detail elsewhere herein. The term modification can be used in connection with modification of a cell that is not dependent on being a recipient cell. For example, isolated cells can be modified prior to receiving an engineered AAV capsid molecule.

[0418] In an embodiment, the invention provides a non-human eukaryotic organism; for example, a multicellular eukaryotic organism, including a eukaryotic host cell containing one or more components of an engineered delivery system described herein according to any of the described embodiments. In other embodiments, the invention provides a eukaryotic organism, preferably a multicellular eukaryotic organism, comprising a eukaryotic host cell containing one or more components of an engineered delivery system described herein according to any of the described embodiments. In some embodiments, the organism is a host of AAV.

[0419] In particular embodiments, the plants, algae, fungi, yeast, etc., cells or parts obtained are transgenic plants, comprising an exogenous DNA sequence incorporated into the genome of all or part of the cells.

[0420] The engineered cell can be a prokaryotic cell. The prokaryotic cell can be bacterial cell. The prokaryotic cell can be an archaea cell. The bacterial cell can be any suitable bacterial cell. Suitable bacterial cells can be from the genus Escherichia, Bacillus, Lactobacillus, Rhodococcus, Rhodobacter, Synechococcus, Synechocystis, Pseudomonas, Pseudoalteromonas, Stenotrophomonas, and Streptomyces Suitable bacterial cells include, but are not limited to Escherichia coli cells, Caulobacter crescentus cells, Rhodobacter sphaeroides cells, Pseudoalteromonas haloplanktis cells. Suitable strains of bacterial include, but are not limited to BL21 (DE3), DL21 (DE3)-pLysS, BL21 Star-pLysS, BL21-SI, BL21-AI, Tuner, Tuner pLysS, Origami, Origami B pLysS, Rosetta, Rosetta pLysS, Rosetta-gami-pLysS, BL21 CodonPlus, AD494, BL2trxB, HMS174, NovaBlue (DE3), BLR, C41 (DE3), C43 (DE3), Lemo21 (DE3), Shuffle T7, ArcticExpress and ArcticExpress (DE3).

[0421] The engineered cell can be a eukaryotic cell. The eukaryotic cells may be those of or derived from a particular organism, such as a plant or a mammal, including but not limited to human, or non-human eukaryote or animal or mammal as herein discussed, e.g., mouse, rat, rabbit, dog, livestock, or non-human mammal or primate. In some embodiments the engineered cell can be a cell line. Examples of cell lines include, but are not limited to, C8161, CCRF-CEM, MOLT, mIMCD-3, NHDF, HeLa-S3, Huh1, Huh4, Huh7, HUVEC, HASMC, HEKn, HEKa, MiaPaCell, Panc1, PC-3, TF1, CTLL-2, CIR, Rat6, CVI, RPTE, A10, T24, J82, A375, ARH-77, Calul, SW480, SW620, SKOV3, SK-UT, CaCo2, P388D1, SEM-K2, WEHI-231, HB56, TIB55, Jurkat, J45.01, LRMB, Bcl-1, BC-3, IC21, DLD2, Raw264.7, NRK, NRK-52E, MRC5, MEF, Hep G2, HeLa B, HeLa T4, COS, COS-1, COS-6, COS-M6A, BS-C-1 monkey kidney epithelial, BALB/3T3 mouse embryo fibroblast, 3T3 Swiss, 3T3-L1, 132-d5 human fetal fibroblasts; 10.1 mouse fibroblasts, 293-T, 3T3, 721, 9L, A2780, A2780ADR, A2780cis, A172, A20, A253, A431, A-549, ALC, B16, B35, BCP-1 cells, BEAS-2B, bEnd.3, BHK-21, BR 293, BxPC3, C3H-10T1/2, C6/36, Cal-27, CHO, CHO-7, CHO—IR, CHO-K1, CHO-K2, CHO-T, CHO Dhfr−/−, COR-L23, COR-L23/CPR, COR-L23/5010, COR-L23/R23, COS-7, COV-434, CML TI, CMT, CT26, D17, DH82, DU145, DuCaP, EL4, EM2, EM3, EMT6/AR1, EMT6/AR10.0, FM3, H1299, H69, HB54, HB55, HCA2, HEK-293, HeLa, Hepalclc7, HL-60, HMEC, HT-29, Jurkat, JY cells, K562 cells, Ku812, KCL22, KG1, KYO1, LNCap, Ma-Mel 1-48, MC-38, MCF-7, MCF-10A, MDA-MB-231, MDA-MB-468, MDA-MB-435, MDCK II, MDCK II, MOR/0.2R, MONO-MAC 6, MTD-1A, MyEnd, NCI-H69/CPR, NCI-H69/LX10, NCI-H69/LX20, NCI-H69/LX4, NIH-3T3, NALM-1, NW-145, OPCN/OPCT cell lines, Peer, PNT-1A/PNT 2, RenCa, RIN-5F, RMA/RMAS, Saos-2 cells, Sf-9, SkBr3, T2, T-47D, T84, THP1 cell line, U373, U87, U937, VCaP, Vero cells, WM39, WT-49, X63, YAC-1, YAR, and transgenic varieties thereof. Cell lines are available from a variety of sources known to those with skill in the art (see, e.g., the American Type Culture Collection (ATCC) (Manassas, Va.)).

[0422] In some embodiments, the engineered cell is a muscle cell (e.g. cardiac muscle, skeletal muscle, and/or smooth muscle), bone cell, blood cell, immune cell (including but not limited to B cells, macrophages, T-cells, CAR-T cells, and the like), kidney cells, bladder cells, lung cells, heart cells, liver cells, brain cells, neurons, skin cells, stomach cells, neuronal support cells, intestinal cells, epithelial cells, endothelial cells, stem or other progenitor cells, adrenal gland cells, cartilage cells, and combinations thereof.

[0423] In some embodiments, the engineered cell can be a fungus cell. As used herein, a “fungal cell” refers to any type of eukaryotic cell within the kingdom of fungi. Phyla within the kingdom of fungi include Ascomycota, Basidiomycota, Blastocladiomycota, Chytridiomycota, Glomeromycota, Microsporidia, and Neocallimastigomycota. Fungal cells may include yeasts, molds, and filamentous fungi. In some embodiments, the fungal cell is a yeast cell.

[0424] As used herein, the term “yeast cell” refers to any fungal cell within the phyla Ascomycota and Basidiomycota. Yeast cells may include budding yeast cells, fission yeast cells, and mold cells. Without being limited to these organisms, many types of yeast used in laboratory and industrial settings are part of the phylum Ascomycota. In some embodiments, the yeast cell is an S. cerevisiae, Kluyveromyces marxianus, or Issatchenkia orientalis cell. Other yeast cells may include without limitation Candida spp. (e.g., Candida albicans), Yarrowia spp. (e.g., Yarrowia lipolytica), Pichia spp. (e.g., Pichia pastoris), Kluyveromyces spp. (e.g., Kluyveromyces lactis and Kluyveromyces marxianus), Neurospora spp. (e.g., Neurospora crassa), Fusarium spp. (e.g., Fusarium oxysporum), and Issatchenkia spp. (e.g., Issatchenkia orientalis, a.k.a. Pichia kudriavzevii and Candida acidothermophilum). In some embodiments, the fungal cell is a filamentous fungal cell. As used herein, the term “filamentous fungal cell” refers to any type of fungal cell that grows in filaments, i.e., hyphae or mycelia. Examples of filamentous fungal cells may include without limitation Aspergillus spp. (e.g., Aspergillus niger), Trichoderma spp. (e.g., Trichoderma reesei), Rhizopus spp. (e.g., Rhizopus oryzae), and Mortierella spp. (e.g., Mortierella isabellina).

[0425] In some embodiments, the fungal cell is an industrial strain. As used herein, “industrial strain” refers to any strain of fungal cell used in or isolated from an industrial process, e.g., production of a product on a commercial or industrial scale. Industrial strain may refer to a fungal species that is typically used in an industrial process, or it may refer to an isolate of a fungal species that may be also used for non-industrial purposes (e.g., laboratory research). Examples of industrial processes may include fermentation (e.g., in production of food or beverage products), distillation, biofuel production, production of a compound, and production of a polypeptide. Examples of industrial strains can include, without limitation, JAY270 and ATCC4124.

[0426] In some embodiments, the fungal cell is a polyploid cell. As used herein, a “polyploid” cell may refer to any cell whose genome is present in more than one copy. A polyploid cell may refer to a type of cell that is naturally found in a polyploid state, or it may refer to a cell that has been induced to exist in a polyploid state (e.g., through specific regulation, alteration, inactivation, activation, or modification of meiosis, cytokinesis, or DNA replication). A polyploid cell may refer to a cell whose entire genome is polyploid, or it may refer to a cell that is polyploid in a particular genomic locus of interest.

[0427] In some embodiments, the fungal cell is a diploid cell. As used herein, a “diploid” cell may refer to any cell whose genome is present in two copies. A diploid cell may refer to a type of cell that is naturally found in a diploid state, or it may refer to a cell that has been induced to exist in a diploid state (e.g., through specific regulation, alteration, inactivation, activation, or modification of meiosis, cytokinesis, or DNA replication). For example, the S. cerevisiae strain S228C may be maintained in a haploid or diploid state. A diploid cell may refer to a cell whose entire genome is diploid, or it may refer to a cell that is diploid in a particular genomic locus of interest. In some embodiments, the fungal cell is a haploid cell. As used herein, a “haploid” cell may refer to any cell whose genome is present in one copy. A haploid cell may refer to a type of cell that is naturally found in a haploid state, or it may refer to a cell that has been induced to exist in a haploid state (e.g., through specific regulation, alteration, inactivation, activation, or modification of meiosis, cytokinesis, or DNA replication). For example, the S. cerevisiae strain S228C may be maintained in a haploid or diploid state. A haploid cell may refer to a cell whose entire genome is haploid, or it may refer to a cell that is haploid in a particular genomic locus of interest.

[0428] In some embodiments, the engineered cell is a cell obtained from a subject. In some embodiments, the subject is a healthy or non-diseased subject. In some embodiments, the subject is a subject with a desired physiological and/or biological characteristic such that when a engineered AAV capsid particle is produced it can package one or more cargo polynucleotides that can be related to the desired physiological and/or biological characteristic and/or capable of modifying the desired physiological and/or biological characteristic. Thus, the cargo polynucleotides of the produced engineered AAV capsid particle can be capable of transferring the desired characteristic to a recipient cell. In some embodiments, the cargo polynucleotides are capable of modifying a polynucleotide of the engineered cell such that the engineered cell has a desired physiological and/or biological characteristic.

[0429] In some embodiments, a cell transfected with one or more vectors described herein is used to establish a new cell line comprising one or more vector-derived sequences.

[0430] The engineered cells can be used to produce engineered AAV capsid polynucleotides, vectors, and/or particles. In some embodiments, the engineered AAV capsid polynucleotides, vectors, and/or particles are produced, harvested, and/or delivered to a subject in need thereof. In some embodiments, the engineered cells are delivered to a subject. Other uses for the engineered cells are described elsewhere herein. In some embodiments, the engineered cells can be included in formulations and/or kits described elsewhere herein.

[0431] The engineered cells can be stored short-term or long-term for use at a later time. Suitable storage methods are generally known in the art. Further, methods of restoring the stored cells for use (such as thawing, reconstitution, and otherwise stimulating metabolism in the engineered cell after storage) at a later time are also generally known in the art.

### Formulations

[0432] Component(s) of the engineered AAV capsid system, engineered cells, engineered AAV capsid particles, and/or combinations thereof can be included in a formulation that can be delivered to a subject or a cell. In some embodiments, the formulation is a pharmaceutical formulation. One or more of the polypeptides, polynucleotides, vectors, cells, and combinations thereof described herein can be provided to a subject in need thereof or a cell alone or as an active ingredient, such as in a pharmaceutical formulation. As such, also described herein are pharmaceutical formulations containing an amount of one or more of the polypeptides, polynucleotides, vectors, cells, or combinations thereof described herein. In some embodiments, the pharmaceutical formulation can contain an effective amount of the one or more of the polypeptides, polynucleotides, vectors, cells, and combinations thereof described herein. The pharmaceutical formulations described herein can be administered to a subject in need thereof or a cell.

[0433] In some embodiments, the amount of the one or more of the polypeptides, polynucleotides, vectors, cells, virus particles, nanoparticles, other delivery particles, and combinations thereof described herein contained in the pharmaceutical formulation can range from about 1 μg/kg to about 10 mg/kg based upon the bodyweight of the subject in need thereof or average bodyweight of the specific patient population to which the pharmaceutical formulation can be administered. The amount of the one or more of the polypeptides, polynucleotides, vectors, cells, and combinations thereof described herein in the pharmaceutical formulation can range from about 1 μg to about 10 g, from about 10 nL to about 10 ml. In embodiments where the pharmaceutical formulation contains one or more cells, the amount can range from about 1 cell to 1×10², 1×10³, 1×10⁴, 1×10⁵, 1×10⁶, 1×10⁷, 1×10⁸, 1×10⁹, 1×10¹⁰ or more cells. In embodiments where the pharmaceutical formulation contains one or more cells, the amount can range from about 1 cell to 1×10², 1×10³, 1×10⁴, 1×10⁵, 1×10⁶, 1×10⁷, 1×10⁸, 1×10⁹, 1×10¹⁰ or more cells per nL, μL, mL, or L.

[0434] In embodiments, were engineered AAV capsid particles are included in the formulation, the formulation can contain 1 to 1×10¹, 1×10², 1×10³, 1×10⁴, 1×10⁵, 1×10⁶, 1×10⁷, 1×10⁸, 1×10⁹, 1×10¹⁰, 1×10¹¹, 1×10¹², 1×10¹³, 1×10¹⁴, 1×10¹⁵, 1×10¹⁶, 1×10¹⁷, 1×10¹⁸, 1×10¹⁹, or 1×10²⁰ transducing units (TU)/mL of the engineered AAV capsid particles. In some embodiments, the formulation can be 0.1 to 100 mL in volume and can contain 1 to 1×10¹, 1×10², 1×10³, 1×10⁴, 1×10⁵, 1×10⁶, 1×10⁷, 1×10⁸, 1×10⁹, 1×10¹⁰, 1×10¹¹, 1×10¹², 1×10¹³, 1×10¹⁴, 1×10¹⁵, 1×10¹⁶, 1×10¹⁷, 1×10¹⁸, 1×10¹⁹, or 1×10²⁰ transducing units (TU)/mL of the engineered AAV capsid particles.

### Pharmaceutically Acceptable Carriers and Auxiliary Ingredients and Agents

[0435] In embodiments, the pharmaceutical formulation containing an amount of one or more of the polypeptides, polynucleotides, vectors, cells, virus particles, nanoparticles, other delivery particles, and combinations thereof described herein can further include a pharmaceutically acceptable carrier. Suitable pharmaceutically acceptable carriers include, but are not limited to, water, salt solutions, alcohols, gum arabic, vegetable oils, benzyl alcohols, polyethylene glycols, gelatin, carbohydrates such as lactose, amylose or starch, magnesium stearate, talc, silicic acid, viscous paraffin, perfume oil, fatty acid esters, hydroxy methylcellulose, and polyvinyl pyrrolidone, which do not deleteriously react with the active composition.

[0436] The pharmaceutical formulations can be sterilized, and if desired, mixed with auxiliary agents, such as lubricants, preservatives, stabilizers, wetting agents, emulsifiers, salts for influencing osmotic pressure, buffers, coloring, flavoring and/or aromatic substances, and the like which do not deleteriously react with the active composition.

[0437] In addition to an amount of one or more of the polypeptides, polynucleotides, vectors, cells, engineered AAV capsid particles, nanoparticles, other delivery particles, and combinations thereof described herein, the pharmaceutical formulation can also include an effective amount of an auxiliary active agent, including but not limited to, polynucleotides, amino acids, peptides, polypeptides, antibodies, aptamers, ribozymes, hormones, immunomodulators, antipyretics, anxiolytics, antipsychotics, analgesics, antispasmodics, anti-inflammatories, anti-histamines, anti-infectives, chemotherapeutics, and combinations thereof.

[0438] Suitable hormones include, but are not limited to, amino-acid derived hormones (e.g. melatonin and thyroxine), small peptide hormones and protein hormones (e.g. thyrotropin-releasing hormone, vasopressin, insulin, growth hormone, luteinizing hormone, follicle-stimulating hormone, and thyroid-stimulating hormone), eicosanoids (e.g. arachidonic acid, lipoxins, and prostaglandins), and steroid hormones (e.g. estradiol, testosterone, tetrahydro testosterone Cortisol). Suitable immunomodulators include, but are not limited to, prednisone, azathioprine, 6-MP, cyclosporine, tacrolimus, methotrexate, interleukins (e.g. IL-2, IL-7, and IL-12), cytokines (e.g. interferons (e.g. IFN-α, IFN-β, IFN-ε, IFN-K, IFN-ω, and IFN-γ), granulocyte colony-stimulating factor, and imiquimod), chemokines (e.g. CCL3, CCL26 and CXCL7), cytosine phosphate-guanosine, oligodeoxynucleotides, glucans, antibodies, and aptamers).

[0439] Suitable antipyretics include, but are not limited to, non-steroidal anti-inflammants (e.g. ibuprofen, naproxen, ketoprofen, and nimesulide), aspirin and related salicylates (e.g. choline salicylate, magnesium salicylate, and sodium salicylate), paracetamol/acetaminophen, metamizole, nabumetone, phenazone, and quinine.

[0440] Suitable anxiolytics include, but are not limited to, benzodiazepines (e.g. alprazolam, bromazepam, chlordiazepoxide, clonazepam, clorazepate, diazepam, flurazepam, lorazepam, oxazepam, temazepam, triazolam, and tofisopam), serotonergic antidepressants (e.g. selective serotonin reuptake inhibitors, tricyclic antidepressants, and monoamine oxidase inhibitors), mebicar, afobazole, selank, bromantane, emoxypine, azapirones, barbiturates, hydroxyzine, pregabalin, validol, and beta blockers.

[0441] Suitable antipsychotics include, but are not limited to, benperidol, bromoperidol, droperidol, haloperidol, moperone, pipaperone, timiperone, fluspirilene, penfluridol, pimozide, acepromazine, chlorpromazine, cyamemazine, dizyrazine, fluphenazine, levomepromazine, mesoridazine, perazine, pericyazine, perphenazine, pipotiazine, prochlorperazine, promazine, promethazine, prothipendyl, thioproperazine, thioridazine, trifluoperazine, triflupromazine, chlorprothixene, clopenthixol, flupentixol, tiotixene, zuclopenthixol, clotiapine, loxapine, prothipendyl, carpipramine, clocapramine, molindone, mosapramine, sulpiride, veralipride, amisulpride, amoxapine, aripiprazole, asenapine, clozapine, blonanserin, iloperidone, lurasidone, melperone, nemonapride, olanzapine, paliperidone, perospirone, quetiapine, remoxipride, risperidone, sertindole, trimipramine, ziprasidone, zotepine, alstonia, bifeprunox, bitopertin, brexpiprazole, cannabidiol, cariprazine, pimavanserin, pomaglumetad methionil, vabicaserin, xanomeline, and zicronapine.

[0442] Suitable analgesics include, but are not limited to, paracetamol/acetaminophen, nonsteroidal anti-inflammants (e.g. ibuprofen, naproxen, ketoprofen, and nimesulide), COX-2 inhibitors (e.g. rofecoxib, celecoxib, and etoricoxib), opioids (e.g. morphine, codeine, oxycodone, hydrocodone, dihydromorphine, pethidine, buprenorphine), tramadol, norepinephrine, flupirtine, nefopam, orphenadrine, pregabalin, gabapentin, cyclobenzaprine, scopolamine, methadone, ketobemidone, piritramide, and aspirin and related salicylates (e.g. choline salicylate, magnesium salicylate, and sodium salicylate).

[0443] Suitable antispasmodics include, but are not limited to, mebeverine, papaverine, cyclobenzaprine, carisoprodol, orphenadrine, tizanidine, metaxalone, methocarbamol, chlorzoxazone, baclofen, dantrolene, baclofen, tizanidine, and dantrolene. Suitable anti-inflammatories include, but are not limited to, prednisone, non-steroidal anti-inflammants (e.g. ibuprofen, naproxen, ketoprofen, and nimesulide), COX-2 inhibitors (e.g. rofecoxib, celecoxib, and etoricoxib), and immune selective anti-inflammatory derivatives (e.g. submandibular gland peptide-T and its derivatives).

[0444] Suitable anti-histamines include, but are not limited to, H1-receptor antagonists (e.g. acrivastine, azelastine, bilastine, brompheniramine, buclizine, bromodiphenhydramine, carbinoxamine, cetirizine, chlorpromazine, cyclizine, chlorpheniramine, clemastine, cyproheptadine, desloratadine, dexbrompheniramine, dexchlorpheniramine, dimenhydrinate, dimetindene, diphenhydramine, doxylamine, ebastine, embramine, fexofenadine, hydroxyzine, levocetirizine, loratadine, meclozine, mirtazapine, olopatadine, orphenadrine, phenindamine, pheniramine, phenyltoloxamine, promethazine, pyrilamine, quetiapine, rupatadine, tripelennamine, and triprolidine), H2-receptor antagonists (e.g. cimetidine, famotidine, lafutidine, nizatidine, ranitidine, and roxatidine), tritoqualine, catechin, cromoglicate, nedocromil, and p2-adrenergic agonists.

[0445] Suitable anti-infectives include, but are not limited to, amebicides (e.g. nitazoxanide, paromomycin, metronidazole, tinidazole, chloroquine, miltefosine, amphotericin b, and iodoquinol), aminoglycosides (e.g. paromomycin, tobramycin, gentamicin, amikacin, kanamycin, and neomycin), anthelmintics (e.g. pyrantel, mebendazole, ivermectin, praziquantel, albendazole, thiabendazole, oxamniquine), antifungals (e.g. azole antifungals (e.g. itraconazole, fluconazole, parconazole, ketoconazole, clotrimazole, miconazole, and voriconazole), echinocandins (e.g. caspofungin, anidulafungin, and micafungin), griseofulvin, terbinafine, flucytosine, and polyenes (e.g. nystatin, and amphotericin b), antimalarial agents (e.g. pyrimethamine/sulfadoxine, artemether/lumefantrine, atovaquone/proguanil, quinine, hydroxychloroquine, mefloquine, chloroquine, doxycycline, pyrimethamine, and halofantrine), antituberculosis agents (e.g. aminosalicylates (e.g. aminosalicylic acid), isoniazid/rifampin, isoniazid/pyrazinamide/rifampin, bedaquiline, isoniazid, ethambutol, rifampin, rifabutin, rifapentine, capreomycin, and cycloserine), antivirals (e.g. amantadine, rimantadine, abacavir/lamivudine, emtricitabine/tenofovir, cobicistat/elvitegravir/emtricitabine/tenofovir, efavirenz/emtricitabine/tenofovir, abacavir/lamivudine/zidovudine, lamivudine/zidovudine, emtricitabine/tenofovir, emtricitabine/lopinavir/ritonavir/tenofovir, interferon alfa-2v/ribavirin, peginterferon alfa-2b, maraviroc, raltegravir, dolutegravir, enfuvirtide, foscarnet, fomivirsen, oseltamivir, zanamivir, nevirapine, efavirenz, etravirine, rilpivirine, delavirdine, nevirapine, entecavir, lamivudine, adefovir, sofosbuvir, didanosine, tenofovir, abacavir, zidovudine, stavudine, emtricitabine, zalcitabine, telbivudine, simeprevir, boceprevir, telaprevir, lopinavir/ritonavir, boceprevir, darunavir, ritonavir, tipranavir, atazanavir, nelfinavir, amprenavir, indinavir, saquinavir, ribavirin, valacyclovir, acyclovir, famciclovir, ganciclovir, and valganciclovir), carbapenems (e.g. doripenem, meropenem, ertapenem, and cilastatin/imipenem), cephalosporins (e.g. cefadroxil, cephradine, cefazolin, cephalexin, cefepime, cefazoline, loracarbef, cefotetan, cefuroxime, cefprozil, loracarbef, cefoxitin, cefaclor, ceftibuten, ceftriaxone, cefotaxime, cefpodoxime, cefdinir, cefixime, cefditoren, ceftizoxime, and ceftazidime), glycopeptide antibiotics (e.g. vancomycin, dalbavancin, oritavancin, and telavancin), glycylcyclines (e.g. tigecycline), leprostatics (e.g. clofazimine and thalidomide), lincomycin and derivatives thereof (e.g. clindamycin and lincomycin), macrolides and derivatives thereof (e.g. telithromycin, fidaxomicin, erythromycin, azithromycin, clarithromycin, dirithromycin, and troleandomycin), linezolid, sulfamethoxazole/trimethoprim, rifaximin, chloramphenicol, Fosfomycin, metronidazole, aztreonam, bacitracin, penicillin (amoxicillin, ampicillin, bacampicillin, carbenicillin, piperacillin, ticarcillin, amoxicillin/clavulanate, ampicillin/sulbactam, piperacillin/tazobactam, clavulanate/ticarcillin, penicillin, procaine penicillin, oxacillin, dicloxacillin, and nafcillin), quinolones (e.g. lomefloxacin, norfloxacin, ofloxacin, gatifloxacin, moxifloxacin, ciprofloxacin, levofloxacin, gemifloxacin, moxifloxacin, cinoxacin, nalidixic acid, enoxacin, grepafloxacin, gatifloxacin, trovafloxacin, and sparfloxacin), sulfonamides (e.g. sulfamethoxazole/trimethoprim, sulfasalazine, and sulfasoxazole), tetracyclines (e.g. doxycycline, demeclocycline, minocycline, doxycycline/salicylic acid, doxycycline/omega-3 polyunsaturated fatty acids, and tetracycline), and urinary anti-infectives (e.g. nitrofurantoin, methenamine, Fosfomycin, cinoxacin, nalidixic acid, trimethoprim, and methylene blue).

[0446] Suitable chemotherapeutics include, but are not limited to, paclitaxel, brentuximab vedotin, doxorubicin, 5-FU (fluorouracil), everolimus, pemetrexed, melphalan, pamidronate, anastrozole, exemestane, nelarabine, ofatumumab, bevacizumab, belinostat, tositumomab, carmustine, bleomycin, bosutinib, busulfan, alemtuzumab, irinotecan, vandetanib, bicalutamide, lomustine, daunorubicin, clofarabine, cabozantinib, dactinomycin, ramucirumab, cytarabine, Cytoxan, cyclophosphamide, decitabine, dexamethasone, docetaxel, hydroxyurea, dacarbazine, leuprolide, epirubicin, oxaliplatin, asparaginase, estramustine, cetuximab, vismodegib, asparaginase Erwinia chrysanthemi, amifostine, etoposide, flutamide, toremifene, fulvestrant, letrozole, degarelix, pralatrexate, methotrexate, floxuridine, obinutuzumab, gemcitabine, afatinib, imatinib mesylate, carmustine, eribulin, trastuzumab, altretamine, topotecan, ponatinib, idarubicin, ifosfamide, ibrutinib, axitinib, interferon alfa-2a, gefitinib, romidepsin, ixabepilone, ruxolitinib, cabazitaxel, ado-trastuzumab emtansine, carfilzomib, chlorambucil, sargramostim, cladribine, mitotane, vincristine, procarbazine, megestrol, trametinib, mesna, strontium-89 chloride, mechlorethamine, mitomycin, busulfan, gemtuzumab ozogamicin, vinorelbine, filgrastim, pegfilgrastim, sorafenib, nilutamide, pentostatin, tamoxifen, mitoxantrone, pegaspargase, denileukin diftitox, alitretinoin, carboplatin, pertuzumab, cisplatin, pomalidomide, prednisone, aldesleukin, mercaptopurine, zoledronic acid, lenalidomide, rituximab, octreotide, dasatinib, regorafenib, histrelin, sunitinib, siltuximab, omacetaxine, thioguanine (tioguanine), dabrafenib, erlotinib, bexarotene, temozolomide, thiotepa, thalidomide, BCG, temsirolimus, bendamustine hydrochloride, triptorelin, arsenic trioxide, lapatinib, valrubicin, panitumumab, vinblastine, bortezomib, tretinoin, azacitidine, pazopanib, teniposide, leucovorin, crizotinib, capecitabine, enzalutamide, ipilimumab, goserelin, vorinostat, idelalisib, ceritinib, abiraterone, epothilone, tafluposide, azathioprine, doxifluridine, vindesine, and all-trans retinoic acid.

[0447] In embodiments where there is an auxiliary active agent contained in the pharmaceutical formulation in addition to the one or more of the polypeptides, polynucleotides, CRISPR-Cas complexes, vectors, cells, virus particles, nanoparticles, other delivery particles, and combinations thereof described herein, amount, such as an effective amount, of the auxiliary active agent will vary depending on the auxiliary active agent. In some embodiments, the amount of the auxiliary active agent ranges from 0.001 micrograms to about 1 milligram. In other embodiments, the amount of the auxiliary active agent ranges from about 0.01 IU to about 1000 IU. In further embodiments, the amount of the auxiliary active agent ranges from 0.001 mL to about 1 mL. In yet other embodiments, the amount of the auxiliary active agent ranges from about 1% w/w to about 50% w/w of the total pharmaceutical formulation. In additional embodiments, the amount of the auxiliary active agent ranges from about 1% v/v to about 50% v/v of the total pharmaceutical formulation. In still other embodiments, the amount of the auxiliary active agent ranges from about 1% w/v to about 50% w/v of the total pharmaceutical formulation.

### Dosage Forms

[0448] In some embodiments, the pharmaceutical formulations described herein may be in a dosage form. The dosage forms can be adapted for administration by any appropriate route. Appropriate routes include, but are not limited to, oral (including buccal or sublingual), rectal, epidural, intracranial, intraocular, inhaled, intranasal, topical (including buccal, sublingual, or transdermal), vaginal, intraurethral, parenteral, intracranial, subcutaneous, intramuscular, intravenous, intraperitoneal, intradermal, intraosseous, intracardiac, intraarticular, intracavernous, intrathecal, intravitreal, intracerebral, gingival, subgingival, intracerebroventricular, and intradermal. Such formulations may be prepared by any method known in the art.

[0449] Dosage forms adapted for oral administration can be discrete dosage units such as capsules, pellets or tablets, powders or granules, solutions, or suspensions in aqueous or non-aqueous liquids; edible foams or whips, or in oil-in-water liquid emulsions or water-in-oil liquid emulsions. In some embodiments, the pharmaceutical formulations adapted for oral administration also include one or more agents which flavor, preserve, color, or help disperse the pharmaceutical formulation. Dosage forms prepared for oral administration can also be in the form of a liquid solution that can be delivered as foam, spray, or liquid solution. In some embodiments, the oral dosage form can contain about 1 ng to 1000 g of a pharmaceutical formulation containing a therapeutically effective amount or an appropriate fraction thereof of the targeted effector fusion protein and/or complex thereof or composition containing the one or more of the polypeptides, polynucleotides, vectors, cells, and combinations thereof described herein. The oral dosage form can be administered to a subject in need thereof.

[0450] Where appropriate, the dosage forms described herein can be microencapsulated.

[0451] The dosage form can also be prepared to prolong or sustain the release of any ingredient. In some embodiments, the one or more of the polypeptides, polynucleotides, vectors, cells, and combinations thereof described herein can be the ingredient whose release is delayed. In other embodiments, the release of an optionally included auxiliary ingredient is delayed. Suitable methods for delaying the release of an ingredient include, but are not limited to, coating or embedding the ingredients in material in polymers, wax, gels, and the like. Delayed release dosage formulations can be prepared as described in standard references such as “Pharmaceutical dosage form tablets,” eds. Liberman et. al. (New York, Marcel Dekker, Inc., 1989), “Remington—The science and practice of pharmacy”, 20th ed., Lippincott Williams & Wilkins, Baltimore, MD, 2000, and “Pharmaceutical dosage forms and drug delivery systems”, 6^{th} Edition, Ansel et al., (Media, PA: Williams and Wilkins, 1995). These references provide information on excipients, materials, equipment, and processes for preparing tablets and capsules and delayed release dosage forms of tablets and pellets, capsules, and granules. The delayed release can be anywhere from about an hour to about 3 months or more.

[0452] Examples of suitable coating materials include, but are not limited to, cellulose polymers such as cellulose acetate phthalate, hydroxypropyl cellulose, hydroxypropyl methylcellulose, hydroxypropyl methylcellulose phthalate, and hydroxypropyl methylcellulose acetate succinate; polyvinyl acetate phthalate, acrylic acid polymers and copolymers, and methacrylic resins that are commercially available under the trade name EUDRAGIT® (Roth Pharma, Weiterstadt, Germany), zein, shellac, and polysaccharides.

[0453] Coatings may be formed with a different ratio of water-soluble polymer, water insoluble polymers, and/or pH dependent polymers, with or without water insoluble/water soluble non-polymeric excipient, to produce the desired release profile. The coating is either performed on the dosage form (matrix or simple) which includes, but is not limited to, tablets (compressed with or without coated beads), capsules (with or without coated beads), beads, particle compositions, “ingredient as is” formulated as, but not limited to, suspension form or as a sprinkle dosage form.

[0454] Dosage forms adapted for topical administration can be formulated as ointments, creams, suspensions, lotions, powders, solutions, pastes, gels, sprays, aerosols, or oils. In some embodiments for treatments of the eye or other external tissues, for example the mouth or the skin, the pharmaceutical formulations are applied as a topical ointment or cream. When formulated in an ointment, the one or more of the polypeptides, polynucleotides, vectors, cells, and combinations thereof described herein can be formulated with a paraffinic or water-miscible ointment base. In some embodiments, the active ingredient can be formulated in a cream with an oil-in-water cream base or a water-in-oil base. Dosage forms adapted for topical administration in the mouth include lozenges, pastilles, and mouth washes.

[0455] Dosage forms adapted for nasal or inhalation administration include aerosols, solutions, suspension drops, gels, or dry powders. In some embodiments, the one or more of the polypeptides, polynucleotides, vectors, cells, and combinations thereof described herein is contained in a dosage form adapted for inhalation is in a particle-size-reduced form that is obtained or obtainable by micronization. In some embodiments, the particle size of the size reduced (e.g. micronized) compound or salt or solvate thereof, is defined by a D50 value of about 0.5 to about 10 microns as measured by an appropriate method known in the art. Dosage forms adapted for administration by inhalation also include particle dusts or mists. Suitable dosage forms wherein the carrier or excipient is a liquid for administration as a nasal spray or drops include aqueous or oil solutions/suspensions of an active ingredient (e.g. the one or more of the polypeptides, polynucleotides, vectors, cells, and combinations thereof described herein and/or auxiliary active agent), which may be generated by various types of metered dose pressurized aerosols, nebulizers, or insufflators.

[0456] In some embodiments, the dosage forms can be aerosol formulations suitable for administration by inhalation. In some of these embodiments, the aerosol formulation can contain a solution or fine suspension of the one or more of the polypeptides, polynucleotides, vectors, cells, and combinations thereof described herein and a pharmaceutically acceptable aqueous or non-aqueous solvent. Aerosol formulations can be presented in single or multi-dose quantities in sterile form in a sealed container. For some of these embodiments, the sealed container is a single dose or multi-dose nasal or an aerosol dispenser fitted with a metering valve (e.g. metered dose inhaler), which is intended for disposal once the contents of the container have been exhausted.

[0457] Where the aerosol dosage form is contained in an aerosol dispenser, the dispenser contains a suitable propellant under pressure, such as compressed air, carbon dioxide, or an organic propellant, including but not limited to a hydrofluorocarbon. The aerosol formulation dosage forms in other embodiments are contained in a pump-atomizer. The pressurized aerosol formulation can also contain a solution or a suspension of one or more of the polypeptides, polynucleotides, vectors, cells, and combinations thereof described herein. In further embodiments, the aerosol formulation can also contain co-solvents and/or modifiers incorporated to improve, for example, the stability and/or taste and/or fine particle mass characteristics (amount and/or profile) of the formulation. Administration of the aerosol formulation can be once daily or several times daily, for example 2, 3, 4, or 8 times daily, in which 1, 2, or 3 doses are delivered each time.

[0458] For some dosage forms suitable and/or adapted for inhaled administration, the pharmaceutical formulation is a dry powder inhalable formulation. In addition to the one or more of the polypeptides, polynucleotides, vectors, cells, and combinations thereof described herein, an auxiliary active ingredient, and/or pharmaceutically acceptable salt thereof, such a dosage form can contain a powder base such as lactose, glucose, trehalose, manitol, and/or starch. In some of these embodiments, the one or more of the polypeptides, polynucleotides, vectors, cells, and combinations thereof described herein is in a particle-size reduced form. In further embodiments, a performance modifier, such as L-leucine or another amino acid, cellobiose octaacetate, and/or metals salts of stearic acid, such as magnesium or calcium stearate.

[0459] In some embodiments, the aerosol dosage forms can be arranged so that each metered dose of aerosol contains a predetermined amount of an active ingredient, such as the one or more of the one or more of the polypeptides, polynucleotides, vectors, cells, and combinations thereof described herein.

[0460] Dosage forms adapted for vaginal administration can be presented as pessaries, tampons, creams, gels, pastes, foams, or spray formulations. Dosage forms adapted for rectal administration include suppositories or enemas.

[0461] Dosage forms adapted for parenteral administration and/or adapted for any type of injection (e.g. intravenous, intraperitoneal, subcutaneous, intramuscular, intradermal, intraosseous, epidural, intracardiac, intraarticular, intracavernous, gingival, subgingival, intrathecal, intravitreal, intracerebral, and intracerebroventricular) can include aqueous and/or non-aqueous sterile injection solutions, which can contain anti-oxidants, buffers, bacteriostatic, solutes that render the composition isotonic with the blood of the subject, and aqueous and non-aqueous sterile suspensions, which can include suspending agents and thickening agents. The dosage forms adapted for parenteral administration can be presented in a single-unit dose or multi-unit dose containers, including but not limited to sealed ampoules or vials. The doses can be lyophilized and resuspended in a sterile carrier to reconstitute the dose prior to administration. Extemporaneous injection solutions and suspensions can be prepared in some embodiments, from sterile powders, granules, and tablets.

[0462] Dosage forms adapted for ocular administration can include aqueous and/or nonaqueous sterile solutions that can optionally be adapted for injection, and which can optionally contain anti-oxidants, buffers, bacteriostatic, solutes that render the composition isotonic with the eye or fluid contained therein or around the eye of the subject, and aqueous and nonaqueous sterile suspensions, which can include suspending agents and thickening agents.

[0463] For some embodiments, the dosage form contains a predetermined amount of the one or more of the polypeptides, polynucleotides, vectors, cells, and combinations thereof described herein per unit dose. In some embodiments, the predetermined amount of the Such unit doses may therefore be administered once or more than once a day. Such pharmaceutical formulations may be prepared by any of the methods well known in the art.

### Kits

[0464] Also described herein are kits that contain one or more of the one or more of the polypeptides, polynucleotides, vectors, cells, or other components described herein and combinations thereof and pharmaceutical formulations described herein. In embodiments, one or more of the polypeptides, polynucleotides, vectors, cells, and combinations thereof described herein can be presented as a combination kit. As used herein, the terms “combination kit” or “kit of parts” refers to the compounds, or formulations and additional components that are used to package, screen, test, sell, market, deliver, and/or administer the combination of elements or a single element, such as the active ingredient, contained therein. Such additional components include but are not limited to, packaging, syringes, blister packages, bottles, and the like. The combination kit can contain one or more of the components (e.g. one or more of the one or more of the polypeptides, polynucleotides, vectors, cells, and combinations thereof) or formulation thereof can be provided in a single formulation (e.g. a liquid, lyophilized powder, etc.), or in separate formulations. The separate components or formulations can be contained in a single package or in separate packages within the kit. The kit can also include instructions in a tangible medium of expression that can contain information and/or directions regarding the content of the components and/or formulations contained therein, safety information regarding the content of the components(s) and/or formulation(s) contained therein, information regarding the amounts, dosages, indications for use, screening methods, component design recommendations and/or information, recommended treatment regimen(s) for the components(s) and/or formulations contained therein. As used herein, “tangible medium of expression” refers to a medium that is physically tangible or accessible and is not a mere abstract thought or an unrecorded spoken word. “Tangible medium of expression” includes, but is not limited to, words on a cellulosic or plastic material, or data stored in a suitable computer readable memory form. The data can be stored on a unit device, such as a flash memory drive or CD-ROM or on a server that can be accessed by a user via, e.g. a web interface.

[0465] In one embodiment, the invention provides a kit comprising one or more of the components described herein. In some embodiments, the kit comprises a vector system and instructions for using the kit. In some embodiments, the vector system includes a regulatory element operably linked to one or more engineered delivery system polynucleotides as described elsewhere herein and, optionally, a cargo molecule, which can optionally be operably linked to a regulatory element. The one or more engineered delivery system polynucleotides can be included on the same or different vectors as the cargo molecule in embodiments containing a cargo molecule within the kit.

[0466] In some embodiments, the kit comprises a vector system and instructions for using the kit. In some embodiments, the vector system comprises (a) a first regulatory element operably linked to a direct repeat sequence and one or more insertion sites for inserting one or more guide sequences up- or downstream (whichever applicable) of the direct repeat sequence, wherein when expressed, the guide sequence directs sequence-specific binding of a Cas9 CRISPR complex to a target sequence in a eukaryotic cell, wherein the Cas9 CRISPR complex comprises a Cas9 enzyme complexed with the guide sequence that is hybridized to the target sequence; and/or (b) a second regulatory element operably linked to an enzyme-coding sequence encoding said Cas9 enzyme comprising a nuclear localization sequence. Where applicable, a tracr sequence may also be provided. In some embodiments, the kit comprises components (a) and (b) located on the same or different vectors of the system. In some embodiments, component (a) further comprises two or more guide sequences operably linked to the first regulatory element, wherein when expressed, each of the two or more guide sequences direct sequence specific binding of a CRISPR complex to a different target sequence in a eukaryotic cell. In some embodiments, the Cas9 enzyme comprises one or more nuclear localization sequences of sufficient strength to drive accumulation of said CRISPR enzyme in a detectable amount in the nucleus of a eukaryotic cell. In some embodiments, the CRISPR enzyme is a type V or VI CRISPR system enzyme. In some embodiments, the CRISPR enzyme is a Cas9 enzyme. In some embodiments, the Cas9 enzyme is derived from Francisella tularensis 1, Francisella tularensis subsp. novicida, Prevotella albensis, Lachnospiraceae bacterium MC2017 1, Butyrivibrio proteoclasticus, Peregrinibacteria bacterium GW2011_GWA2_33_10, Parcubacteria bacterium GW2011_GWC2_44_17, Smithella sp. SCADC, Acidaminococcus sp. BV3L6, Lachnospiraceae bacterium MA2020, Candidatus Methanoplasma termitum, Eubacterium eligens, Moraxella bovoculi 237, Leptospira inadai, Lachnospiraceae bacterium ND2006, Porphyromonas crevioricanis 3, Prevotella disiens, or Porphyromonas macacae Cas9 (e.g., modified to have or be associated with at least one DD), and may include further alteration or mutation of the Cas9, and can be a chimeric Cas9. In some embodiments, the DD-CRISPR enzyme is codon-optimized for expression in a eukaryotic cell. In some embodiments, the DD-CRISPR enzyme directs cleavage of one or two strands at the location of the target sequence. In some embodiments, the DD-CRISPR enzyme lacks or substantially DNA strand cleavage activity (e.g., no more than 5% nuclease activity as compared with a wild type enzyme or enzyme not having the mutation or alteration that decreases nuclease activity). In some embodiments, the first regulatory element is a polymerase III promoter. In some embodiments, the second regulatory element is a polymerase II promoter. In some embodiments, the guide sequence is at least 16, 17, 18, 19, 20, 25 nucleotides, or between 16-30, or between 16-25, or between 16-20 nucleotides in length.

### Methods of Using the Engineered AAV Capsid Variants, Virus Particles, Cells, and Formulations Thereof

### General Discussion

[0467] The engineered AAV capsid system polynucleotides, polypeptides, vector(s), engineered cells, engineered AAV capsid particles can be used generally to package and/or deliver one or more cargo polynucleotides to a recipient cell. In some embodiments, delivery is done in cell-specific manner based upon the tropism of the engineered AAV capsid. In some embodiments, engineered AAV capsid particles can be administered to a subject or a cell, tissue, and/or organ and facilitate the transfer and/or integration of the cargo polynucleotide to the recipient cell. In other embodiments, engineered cells capable of producing engineered AAV capsid particles can be generated from engineered AAV capsid system molecules (e.g. polynucleotides, vectors, and vector systems, etc.). In some embodiments, the engineered AAV capsid molecules can be delivered to a subject or a cell, tissue, and/or organ. When delivered to a subject, they engineered delivery system molecule(s) can transform a subject's cell in vivo or ex vivo to produce an engineered cell that can be capable of making an engineered AAV capsid particles, which can be released from the engineered cell and deliver cargo molecule(s) to a recipient cell in vivo or produce personalized engineered AAV capsid particles for reintroduction into the subject from which the recipient cell was obtained. In some embodiments, an engineered cell can be delivered to a subject, where it can release produced engineered AAV capsid particles such that they can then deliver a cargo polynucleotide(s) to a recipient cell. These general processes can be used in a variety of ways to treat and/or prevent disease or a symptom thereof in a subject, generate model cells, generate modified organisms, provide cell selection and screening assays, in bioproduction, and in other various applications.

[0468] In some embodiments, the engineered AAV capsid polynucleotides, vectors, and systems thereof can be used to generate engineered AAV capsid variant libraries that can be mined for variants with a desired cell-specificity. The description provided herein as supported by the various Examples can demonstrate that one having a desired cell-specificity in mind could utilize the present invention as described herein to obtain a capsid with the desired cell-specificity.

[0469] The subject invention may be used as part of a research program wherein there is transmission of results or data. A computer system (or digital device) may be used to receive, transmit, display and/or store results, analyze the data and/or results, and/or produce a report of the results and/or data and/or analysis. A computer system may be understood as a logical apparatus that can read instructions from media (e.g. software) and/or network port (e.g. from the internet), which can optionally be connected to a server having fixed media. A computer system may comprise one or more of a CPU, disk drives, input devices such as keyboard and/or mouse, and a display (e.g. a monitor). Data communication, such as transmission of instructions or reports, can be achieved through a communication medium to a server at a local or a remote location. The communication medium can include any means of transmitting and/or receiving data. For example, the communication medium can be a network connection, a wireless connection, or an internet connection. Such a connection can provide for communication over the World Wide Web. It is envisioned that data relating to the present invention can be transmitted over such networks or connections (or any other suitable means for transmitting information, including but not limited to mailing a physical report, such as a print-out) for reception and/or for review by a receiver. The receiver can be but is not limited to an individual, or electronic system (e.g. one or more computers, and/or one or more servers). In some embodiments, the computer system comprises one or more processors. Processors may be associated with one or more controllers, calculation units, and/or other units of a computer system, or implanted in firmware as desired. If implemented in software, the routines may be stored in any computer readable memory such as in RAM, ROM, flash memory, a magnetic disk, a laser disk, or other suitable storage medium. Likewise, this software may be delivered to a computing device via any known delivery method including, for example, over a communication channel such as a telephone line, the internet, a wireless connection, etc., or via a transportable medium, such as a computer readable disk, flash drive, etc. The various steps may be implemented as various blocks, operations, tools, modules and techniques which, in turn, may be implemented in hardware, firmware, software, or any combination of hardware, firmware, and/or software. When implemented in hardware, some or all of the blocks, operations, techniques, etc. may be implemented in, for example, a custom integrated circuit (IC), an application specific integrated circuit (ASIC), a field programmable logic array (FPGA), a programmable logic array (PLA), etc. A client-server, relational database architecture can be used in embodiments of the invention. A client-server architecture is a network architecture in which each computer or process on the network is either a client or a server. Server computers are typically powerful computers dedicated to managing disk drives (file servers), printers (print servers), or network traffic (network servers). Client computers include PCs (personal computers) or workstations on which users run applications, as well as example output devices as disclosed herein. Client computers rely on server computers for resources, such as files, devices, and even processing power. In some embodiments of the invention, the server computer handles all of the database functionality. The client computer can have software that handles all the front-end data management and can also receive data input from users. A machine readable medium comprising computer-executable code may take many forms, including but not limited to, a tangible storage medium, a carrier wave medium or physical transmission medium. Non-volatile storage media include, for example, optical or magnetic disks, such as any of the storage devices in any computer(s) or the like, such as may be used to implement the databases, etc. shown in the drawings. Volatile storage media include dynamic memory, such as main memory of such a computer platform. Tangible transmission media include coaxial cables; copper wire and fiber optics, including the wires that comprise a bus within a computer system. Carrier-wave transmission media may take the form of electric or electromagnetic signals, or acoustic or light waves such as those generated during radio frequency (RF) and infrared (IR) data communications. Common forms of computer-readable media therefore include for example: a floppy disk, a flexible disk, hard disk, magnetic tape, any other magnetic medium, a CD-ROM, DVD or DVD-ROM, any other optical medium, punch cards paper tape, any other physical storage medium with patterns of holes, a RAM, a ROM, a PROM and EPROM, a FLASH-EPROM, any other memory chip or cartridge, a carrier wave transporting data or instructions, cables or links transporting such a carrier wave, or any other medium from which a computer may read programming code and/or data. Many of these forms of computer readable media may be involved in carrying one or more sequences of one or more instructions to a processor for execution. Accordingly, the invention comprehends performing any method herein-discussed and storing and/or transmitting data and/or results therefrom and/or analysis thereof, as well as products from performing any method herein-discussed, including intermediates.

### Therapeutics

[0470] In some embodiments, one or more molecules of the engineered delivery system, engineered AAV capsid particles, engineered cells, and/or formulations thereof described herein can be delivered to a subject in need thereof as a therapy for one or more diseases. In some embodiments, the disease to be treated is a genetic or epigenetic based disease. In some embodiments, the disease to be treated is not a genetic or epigenetic based disease. In some embodiments, one or more molecules of the engineered delivery system, engineered AAV capsid particles, engineered cells, and/or formulations thereof described herein can be delivered to a subject in need thereof as a treatment or prevention (or as a part of a treatment or prevention) of a disease. It will be appreciated that the specific disease to be treated and/or prevented by delivery of an engineered cell and/or engineered can be dependent on the cargo molecule packaged into an engineered AAV capsid particle.

[0471] Genetic diseases that can be treated are discussed in greater detail elsewhere herein (see e.g. discussion on Gene-modification based-therapies below). Other diseases include but are not limited to any of the following: cancer, Acinetobacter infections, actinomycosis, African sleeping sickness, AIDS/HIV, amoebiasis, Anaplasmosis, Angiostrongyliasis, Anisakiasis, Anthrax, Arcanobacterium haemolyticum infection, Argentine hemorrhagic fever, Ascariasis, Aspergillosis, Astrovirus infection, Babesiosis, Bacterial meningitis, Bacterial pneumonia, Bacterial vaginosis, Bacteroides infection, balantidiasis, Bartonellosis, Baylisascaris infection, BK virus infection, Black Piedra, Blastocystis, Blastomycosis, Bolivian hemorrhagic fever, Botulism, Brazilian hemorrhagic fever, brucellosis, Bubonic plague, Burkholderia infection, buruli ulcer, calicivirus invention, campylobacteriosis, Candidiasis, Capillariasis, Carrion's disease, Cat-scratch disease, cellulitis, Chagas Disease, Chancroid, Chickenpox, Chikungunya, Chlamydia, Chlamydia pneumoniae, Cholera, Chromoblastomycosis, Chytridiomycosis, Clonorchiasis, Clostridium difficile colitis, Coccidioidomycosis, Colorado tick fever, rhinovirus/coronavirus infection (common cold), Creutzfeldt-Jakob disease, Crimean-congo hemorrhagic fever, Cryptococcosis, Cryptosporidiosis, Cutaneous larva migrans (CLM), cyclosporiasis, cysticercosis, cytomegalovirus infection, Dengue fever, Desmodesmus infection, Dientamoebiasis, Diphtheria, Diphyllobothriasis, Dracunculiasis, Ebola, Echinococcosis, Ehrlichiosis, Enterobiasis, Enterococcus infection, Enterovirus infection, Epidemic typhus, Erythema Infectiosum, Exanthem subitum, Fascioliasis, Fasciolopsiasis, fatal familial insomnia, filariasis, Clostridium perfringens infection, Fusobacterium infection, Gas gangrene (clostridial myonecrosis), Geotrichosis, Gerstmann-Straussler-Scheinker syndrome, Giardiasis, Glanders, Gnathostomiasis, Gonorrhea, Granuloma inguinale, Group A streptococcal infection, Group B streptococcal infection, Haemophilus influenzae infection, Hand, foot, and mouth disease, hanta virus pulmonary syndrome, heartland virus disease, Helicobacter pylori infection, hemorrhagic fever with renal syndrome, Hendra virus infection, Hepatitis (all groups A, B, C, D, E), herpes simplex, histoplasmosis, hookworm infection, human bocavirus infection, human ewingii ehrlichiosis, Human granulocytic anaplasmosis, human metapneumovirus infection, human monocytic ehrlichiosis, human papilloma virus, Hymenolepiasis, Epstein-Barr infection, mononucleosis, influenza, isosporiasis, Kawasaki disease, Kingella kingae infection, Kuru, Lassa fever, Legionellosis (Legionnaires disease and Potomac Fever), Leishmaniasis, Leprosy, Leptospirosis, Listeriosis, Lyme disease, lymphatic filariasis, lymphocytic choriomeningitis, Malaria, Marburg hemorrhagic fever, measles, Middle East respiratory syndrome, Melioidosis, meningitis, Meningococcal disease, Metagonimiasis, Microsporidiosis, Molluscum contagiosum, Monkeypox, Mumps, Murine typhus, Mycoplasma pneumonia, Mycoplasma genitalium infection, Mycetoma, Myiasis, Conjunctivitis, Nipah virus infection, Norovirus, Variant Creutzfeldt-Jakob disease, Nocardiosis, Onchocerciasis, Opisthorchiasis, Paracoccidioidomycosis, Paragonimiasis, Pasteurellosis, Pediculosis capitis, Pediculosis corporis, Pediculosis pubis, pelvic inflammatory disease, pertussis, plague, pneumococcal infection, pneumocystis pneumonia, pneumonia, poliomyelitis, prevotella infection, primary amoebic meningoencephalitis, progressive multifocal leukoencephalopathy, Psittacosis, Q fever, rabies, relapsing fever, respiratory syncytial virus infection, rhinovirus infection, rickettsial infection, Rickettsialpox, Rift Valley Fever, Rocky Mountain Spotted Fever, Rotavirus infection, Rubella, Salmonellosis, SARS, Scabies, Scarlet fever, Schistosomiasis, Sepsis, Shigellosis, Shingles, Smallpox, Sporotrichosis, Staphylococcal infection (including MRSA), strongyloidiasis, subacute sclerosing panencephalitis, Syphilis, Taeniasis, tetanus, Trichophyton species infection, Toxocariasis, Toxoplasmosis, Trachoma, Trichinosis, Trichuriasis, Tuberculosis, Tularemia, Typhoid Fever, Typhus Fever, Ureaplasma urealyticum infection, Valley fever, Venezuelan equine encephalitis, Venezuelan hemorrhagic fever, Vibrio species infection, Viral pneumonia, West Nile Fever, White Piedra, Yersinia pseudotuberculosis, Yersiniosis, Yellow fever, Zeaspora, Zika fever, Zygomycosis and combinations thereof.

[0472] Other diseases and disorders that can be treated using embodiments of the present invention include, but are not limited to, endocrine diseases (e.g. Type I and Type II diabetes, gestational diabetes, hypoglycemia. Glucagonoma, Goiter, Hyperthyroidism, hypothyroidism, thyroiditis, thyroid cancer, thyroid hormone resistance, parathyroid gland disorders, Osteoporosis, osteitis deformans, rickets, osteomalacia, hypopituitarism, pituitary tumors, etc.), skin conditions of infections and non-infectious origin, eye diseases of infectious or non-infectious origin, gastrointestinal disorders of infectious or non-infectious origin, cardiovascular diseases of infectious or non-infectious origin, brain and neuron diseases of infectious or non-infectious origin, nervous system diseases of infectious or non-infectious origin, muscle diseases of infectious or non-infectious origin, bone diseases of infectious or non-infectious origin, reproductive system diseases of infectious or non-infectious origin, renal system diseases of infectious or non-infectious origin, blood diseases of infectious or non-infectious origin, lymphatic system diseases of infectious or non-infectious origin, immune system diseases of infectious or non-infectious origin, mental-illness of infectious or non-infectious origin and the like.

[0473] In some embodiments, the disease to be treated is a muscle or muscle related disease or disorder, such as a genetic muscle disease or disorder.

[0474] Other diseases and disorders will be appreciated by those of skill in the art.

### Adoptive Cell Therapies

[0475] Generally speaking, adoptive cell transfer involves the transfer of cells (autologous, allogeneic, and/or xenogeneic) to a subject. The cells, may or may not be, modified and/or otherwise manipulated prior to delivery to the subject.

[0476] In some embodiments, an engineered cell as described herein can be included in an adoptive cell transfer therapy. In some embodiments, an engineered cell as described herein can be delivered to a subject in need thereof. In some embodiments, the cell can be isolated from a subject, manipulated in vitro such that it is capable of generating an engineered AAV capsid particle described herein to produce an engineered cell and delivered back to the subject in an autologous manner or to a different subject in an allogeneic or xenogeneic manner. The cell isolated, manipulated, and/or delivered can be a eukaryotic cell. The cell isolated, manipulated, and/or delivered can be a stem cell. The cell isolated, manipulated, and/or delivered can be a differentiated cell. The cell isolated, manipulated, and/or delivered can be an immune cell, a blood cell, an endocrine cell, a renal cell, an exocrine cell, a nervous system cell, a vascular cell, a muscle cell, a urinary system cell, a bone cell, a soft tissue cell, a cardiac cell, a neuron, or an integumentary system cell. Other specific cell types will instantly be appreciated by one of ordinary skill in the art.

[0477] In some embodiments, the isolated cell can be manipulated such that it becomes an engineered cell as described elsewhere herein (e.g. contain and/or express one or more engineered delivery system molecules or vectors described elsewhere herein). Methods of making such engineered cells are described in greater detail elsewhere herein.

[0478] The administration of the cells or population of cells according to the present invention may be carried out in any convenient manner, including by aerosol inhalation, injection, ingestion, transfusion, implantation or transplantation. The cells or population of cells may be administered to a patient subcutaneously, intradermally, intratumorally, intranodally, intramedullary, intramuscularly, by intravenous or intralymphatic injection, or intraperitoneally. In one embodiment, the cell compositions of the present invention are preferably administered by intravenous injection.

[0479] The administration of the cells or population of cells can be or involve the administration of 10⁴-10⁹ cells per kg body weight including all integer values of cell numbers within those ranges. In some embodiments, 10⁵ to 10⁶ cells/kg are delivered. Dosing in adoptive cell therapies may for example involve administration of from 10⁶ to 10⁹ cells/kg, with or without a course of lymphodepletion, for example with cyclophosphamide. The cells or population of cells can be administrated in one or more doses. In another embodiment, the effective amount of cells are administrated as a single dose. In another embodiment, the effective amount of cells are administrated as more than one dose over a period time. Timing of administration is within the judgment of managing physician and depends on the clinical condition of the patient. The cells or population of cells may be obtained from any source, such as a blood bank or a donor. While individual needs vary, determination of optimal ranges of effective amounts of a given cell type for a particular disease or conditions are within the skill of one in the art. An effective amount means an amount which provides a therapeutic or prophylactic benefit. The dosage administrated will be dependent upon the age, health and weight of the recipient, kind of concurrent treatment, if any, frequency of treatment and the nature of the effect desired.

[0480] In another embodiment, the effective amount of cells or composition comprising those cells are administrated parenterally. The administration can be an intravenous administration. The administration can be directly done by injection within a tissue. In some embodiments, the tissue can be a tumor.

[0481] To guard against possible adverse reactions, engineered cells can be equipped with a transgenic safety switch, in the form of a transgene that renders the cells vulnerable to exposure to a specific signal. For example, the herpes simplex viral thymidine kinase (TK) gene may be used in this way, for example by introduction into the engineered cell similar to that discussed in Greco, et al., Improving the safety of cell therapy with the TK-suicide gene. Front. Pharmacol. 2015; 6: 95. In such cells, administration of a nucleoside prodrug such as ganciclovir or acyclovir causes cell death. Alternative safety switch constructs include inducible caspase 9, for example triggered by administration of a small-molecule dimerizer that brings together two nonfunctional icasp9 molecules to form the active enzyme. A wide variety of alternative approaches to implementing cellular proliferation controls have been described (see U.S. Patent Publication No. 20130071414; PCT Patent Publication WO2011146862; PCT Patent Publication WO2014011987; PCT Patent Publication WO2013040371; Zhou et al. BLOOD, 2014, 123/25:3895-3905; Di Stasi et al., The New England Journal of Medicine 2011; 365:1673-1683; Sadelain M, The New England Journal of Medicine 2011; 365:1735-173; Ramos et al., Stem Cells 28 (6): 1107-15 (2010)).

[0482] Methods of modifying isolated cells to obtain the engineered cells with the desired properties are described elsewhere herein. In some embodiments, the methods can include genome modification, including, but not limited to, genome editing using a CRISPR-Cas system to modify the cell. This can be in addition to introduction of an engineered AAV capsid system molecule describe elsewhere herein.

[0483] Allogeneic cells are rapidly rejected by the host immune system. It has been demonstrated that, allogeneic leukocytes present in non-irradiated blood products will persist for no more than 5 to 6 days (Boni, Muranski et al. 2008 Blood 1; 112(12):4746-54). Thus, to prevent rejection of allogeneic cells, the host's immune system usually has to be suppressed to some extent. However, in the case of adoptive cell transfer the use of immunosuppressive drugs also have a detrimental effect on the introduced therapeutic cells, such as engineered cells described herein. Therefore, to effectively use an adoptive immunotherapy approach in these conditions, the introduced cells would need to be resistant to the immunosuppressive treatment. Thus, in a particular embodiment, the present invention further comprises a step of modifying the engineered cells to make them resistant to an immunosuppressive agent, preferably by inactivating at least one gene encoding a target for an immunosuppressive agent. An immunosuppressive agent is an agent that suppresses immune function by one of several mechanisms of action. An immunosuppressive agent can be, but is not limited to a calcineurin inhibitor, a target of rapamycin, an interleukin-2 receptor α-chain blocker, an inhibitor of inosine monophosphate dehydrogenase, an inhibitor of dihydrofolic acid reductase, a corticosteroid or an immunosuppressive antimetabolite. The present invention allows conferring immunosuppressive resistance to engineered cells for adoptive cell therapy by inactivating the target of the immunosuppressive agent in engineered cells. As non-limiting examples, targets for an immunosuppressive agent can be a receptor for an immunosuppressive agent such as: CD52, glucocorticoid receptor (GR), a FKBP family gene member and a cyclophilin family gene member.

[0484] Immune checkpoints are inhibitory pathways that slow down or stop immune reactions and prevent excessive tissue damage from uncontrolled activity of immune cells. In certain embodiments, the immune checkpoint targeted is the programmed death-1 (PD-1 or CD279) gene (PDCD1). In other embodiments, the immune checkpoint targeted is cytotoxic T-lymphocyte-associated antigen (CTLA-4). In additional embodiments, the immune checkpoint targeted is another member of the CD28 and CTLA4 Ig superfamily such as BTLA, LAG3, ICOS, PDL1 or KIR. In further additional embodiments, the immune checkpoint targeted is a member of the TNFR superfamily such as CD40, OX40, CD137, GITR, CD27 or TIM-3.

[0485] Additional immune checkpoints include Src homology 2 domain-containing protein tyrosine phosphatase 1 (SHP-1) (Watson H A, et al., SHP-1: the next checkpoint target for cancer immunotherapy? Biochem Soc Trans. 2016 Apr. 15; 44(2):356-62). SHP-1 is a widely expressed inhibitory protein tyrosine phosphatase (PTP). In T-cells, it is a negative regulator of antigen-dependent activation and proliferation. It is a cytosolic protein, and therefore not amenable to antibody-mediated therapies, but its role in activation and proliferation makes it an attractive target for genetic manipulation in adoptive transfer strategies, such as chimeric antigen receptor (CAR) T cells. Immune checkpoints may also include T cell immunoreceptor with Ig and ITIM domains (TIGIT/Vstm3/WUCAM/VSIG9) and VISTA (Le Mercier I, et al., (2015) Beyond CTLA-4 and PD-1, the generation Z of negative checkpoint regulators. Front. Immunol. 6:418).

[0486] International Patent Publication No. WO2014172606 relates to the use of MTI and/or MT1 inhibitors to increase proliferation and/or activity of exhausted CD8+ T-cells and to decrease CD8+ T-cell exhaustion (e.g., decrease functionally exhausted or unresponsive CD8+ immune cells). In certain embodiments, metallothioneins are targeted by gene editing in adoptively transferred T cells.

[0487] In certain embodiments, targets of gene editing may be at least one targeted locus involved in the expression of an immune checkpoint protein. Such targets may include, but are not limited to CTLA4, PPP2CA, PPP2CB, PTPN6, PTPN22, PDCD1, ICOS (CD278), PDL1, KIR, LAG3, HAVCR2, BTLA, CD160, TIGIT, CD96, CRTAM, LAIRI, SIGLEC7, SIGLEC9, CD244 (2B4), TNFRSF10B, TNFRSF10A, CASP8, CASP10, CASP3, CASP6, CASP7, FADD, FAS, TGFBRII, TGFRBRI, SMAD2, SMAD3, SMAD4, SMAD10, SKI, SKIL, TGIF1, IL10RA, IL10RB, HMOX2, IL6R, IL6ST, EIF2AK4, CSK, PAG1, SIT1, FOXP3, PRDM1, BATF, VISTA, GUCY1A2, GUCY1A3, GUCY1B2, GUCY1B3, MT1, MT2, CD40, OX40, CD137, GITR, CD27, SHP-1 or TIM-3. In some embodiments, the gene locus involved in the expression of PD-1 or CTLA-4 genes is targeted. In some embodiments, combinations of genes are targeted, such as but not limited to PD-1 and TIGIT.

[0488] In some embodiments, at least two genes are edited. Pairs of genes may include, but are not limited to PD1 and TCRα, PD1 and TCRβ, CTLA-4 and TCRα, CTLA-4 and TCRβ, LAG3 and TCRα, LAG3 and TCRβ, Tim3 and TCRα, Tim3 and TCRβ, BTLA and TCRα, BTLA and TCRβ, BY55 and TCRα, BY55 and TCRβ, TIGIT and TCRα, TIGIT and TCRβ, B7H5 and TCRα, B7H5 and TCRβ, LAIR1 and TCRα, LAIR1 and TCRβ, SIGLEC10 and TCRα, SIGLEC10 and TCRβ, 2B4 and TCRα, 2B4 and TCRβ.

[0489] Whether prior to or after genetic or other modification of the engineered cells (such as engineered T cells (e.g. the isolated cell is a T cell), the engineered cells can be activated and expanded generally using methods as described, for example, in U.S. Pat. Nos. 6,352,694; 6,534,055; 6,905,680; 5,858,358; 6,887,466; 6,905,681; 7,144,575; 7,232,566; 7,175,843; 5,883,223; 6,905,874; 6,797,514; 6,867,041; and 7,572,631. The engineered cells can be expanded in vitro or in vivo.

[0490] In some embodiments, the method comprises editing the engineered cells ex vivo by a suitable gene modification method described elsewhere herein (e.g. gene editing via a CRISPR-Cas system) to eliminate potential alloreactive TCRs or other receptors to allow allogeneic adoptive transfer. In some embodiments, T cells are edited ex vivo by a CRISPR-Cas system or other suitable genome modification technique to knock-out or knock-down an endogenous gene encoding a TCR (e.g., an αβ TCR) or other relevant receptor to avoid graft-versus-host-disease (GVHD). In some embodiments, where the engineered cells are T cells, the engineered cells are edited ex vivo by CRISPR or other appropriate gene modification method to mutate the TRAC locus. In some embodiments, T cells are edited ex vivo via a CRISPR-Cas system using one or more guide sequences targeting the first exon of TRAC. See Liu et al., Cell Research 27:154-157 (2017). In some embodiments, the first exon of TRAC is modified using another appropriate gene modification method. In some embodiments, the method comprises use of CRISPR or other appropriate method to knock-in an exogenous gene encoding a CAR or a TCR into the TRAC locus, while simultaneously knocking-out the endogenous TCR (e.g., with a donor sequence encoding a self-cleaving P2A peptide following the CAR cDNA). See Eyquem et al., Nature 543:113-117 (2017). In some embodiments, the exogenous gene comprises a promoter-less CAR-encoding or TCR-encoding sequence which is inserted operably downstream of an endogenous TCR promoter.

[0491] In some embodiments, the method comprises editing the engineered cell, e.g. engineered T cells, ex vivo via a CRISPR-Cas system to knock-out or knock-down an endogenous gene encoding an HLA-I protein to minimize immunogenicity of the edited cells, e.g. engineered T cells. In some embodiments, engineered T cells can be edited ex vivo via a CRISPR-Cas system to mutate the beta-2 microglobulin (B2M) locus. In some embodiments, engineered cell, e.g. engineered T cells, are edited ex vivo via a CRISPR-Cas system using one or more guide sequences targeting the first exon of B2M. The first exon of B2M can also be modified using another appropriate modification method. See Liu et al., Cell Research 27:154-157(2017). The first exon of B2M can also be modified using another appropriate modification method, which will be appreciated by those of ordinary skill in the art. In some embodiments, the method comprises use a CRISPR-Cas system to knock-in an exogenous gene encoding a CAR or a TCR into the B2M locus, while simultaneously knocking-out the endogenous B2M (e.g., with a donor sequence encoding a self-cleaving P2A peptide following the CAR cDNA). See Eyquem et al., Nature 543:113-117 (2017). This can also be accomplished using another appropriate modification method, which will be appreciated by those of ordinary skill in the art. In some embodiments, the exogenous gene comprises a promoter-less CAR-encoding or TCR-encoding sequence which is inserted operably downstream of an endogenous B2M promoter.

[0492] In some embodiments, the method comprises editing the engineered cell, e.g. engineered T cells, ex vivo via a CRISPR-Cas system to knock-out or knock-down an endogenous gene encoding an antigen targeted by an exogenous CAR or TCR. This can also be accomplished using another appropriate modification method, which will be appreciated by those of ordinary skill in the art. In some embodiments, the engineered cells, such as engineered T cells, are edited ex vivo via a CRISPR-Cas system to knock-out or knock-down the expression of a tumor antigen selected from human telomerase reverse transcriptase (hTERT), survivin, mouse double minute 2 homolog (MDM2), cytochrome P450 1B1 (CYPIB), HER2/neu, Wilms' tumor gene 1 (WT1), livin, alpha fetoprotein (AFP), carcinoembryonic antigen (CEA), mucin 16 (MUC16), MUCI, prostate-specific membrane antigen (PSMA), p53 or cyclin (DI) (see WO2016/011210). This can also be accomplished using another appropriate modification method, which will be appreciated by those of ordinary skill in the art. In some embodiments, the engineered cells, such as engineered T cells are edited ex vivo via a CRISPR-Cas system to knock-out or knock-down the expression of an antigen selected from B cell maturation antigen (BCMA), transmembrane activator and CAML Interactor (TACI), or B-cell activating factor receptor (BAFF-R), CD38, CD138, CS-1, CD33, CD26, CD30, CD53, CD92, CD100, CD148, CD150, CD200, CD261, CD262, or CD362 (see WO2017/011804). This can also be accomplished using another appropriate modification method, which will be appreciated by those of ordinary skill in the art.

### Gene Drives

[0493] The present invention also contemplates use of the engineered delivery system molecules, vectors, engineered cells, and/or engineered AAV capsid particles described herein to generate a gene drive via delivery of one or more cargo polynucleotides or production of engineered AAV capsid particles with one or more cargo polynucleotides capable of producing a gene drive. In some embodiments, the gene drive can be a Cas-mediated RNA-guided gene drive e.g. Cas- to provide RNA-guided gene drives, for example in systems analogous to gene drives described in PCT Patent Publication WO 2015/105928. Systems of this kind may for example provide methods for altering eukaryotic germline cells, by introducing into the germline cell a nucleic acid sequence encoding an RNA-guided DNA nuclease and one or more guide RNAs. The guide RNAs may be designed to be complementary to one or more target locations on genomic DNA of the germline cell. The nucleic acid sequence encoding the RNA guided DNA nuclease and the nucleic acid sequence encoding the guide RNAs may be provided on constructs between flanking sequences, with promoters arranged such that the germline cell may express the RNA guided DNA nuclease and the guide RNAs, together with any desired cargo-encoding sequences that are also situated between the flanking sequences. The flanking sequences will typically include a sequence which is identical to a corresponding sequence on a selected target chromosome, so that the flanking sequences work with the components encoded by the construct to facilitate insertion of the foreign nucleic acid construct sequences into genomic DNA at a target cut site by mechanisms such as homologous recombination, to render the germline cell homozygous for the foreign nucleic acid sequence. In this way, gene-drive systems are capable of introgressing desired cargo genes throughout a breeding population (Gantz et al., 2015, Highly efficient Cas9-mediated gene drive for population modification of the malaria vector mosquito Anopheles stephensi, PNAS 2015, published ahead of print Nov. 23, 2015, doi:10.1073/pnas.1521077112; Esvelt et al., 2014, Concerning RNA-guided gene drives for the alteration of wild populations eLife 2014; 3: e03401). In select embodiments, target sequences may be selected which have few potential off-target sites in a genome. Targeting multiple sites within a target locus, using multiple guide RNAs, may increase the cutting frequency and hinder the evolution of drive resistant alleles. Truncated guide RNAs may reduce off-target cutting. Paired nickases may be used instead of a single nuclease, to further increase specificity. Gene drive constructs (such as gene drive engineered delivery system constructs) may include cargo sequences encoding transcriptional regulators, for example to activate homologous recombination genes and/or repress non-homologous end-joining. Target sites may be chosen within an essential gene, so that non-homologous end-joining events may cause lethality rather than creating a drive-resistant allele. The gene drive constructs can be engineered to function in a range of hosts at a range of temperatures (Cho et al. 2013, Rapid and Tunable Control of Protein Stability in Caenorhabditis elegans Using a Small Molecule, PLOS ONE 8 (8): e72393. doi:10.1371/journal.pone.0072393).

### Transplantation and Xenotransplantation

[0494] The engineered AAV capsid system molecules, vectors, engineered cells, and/or engineered delivery particles described herein, can be used to deliver cargo polynucleotides and/or otherwise be involved in modifying tissues for transplantation between two different persons (transplantation) or between species (xenotransplantation). Such techniques for generation of transgenic animals is described elsewhere herein. Interspecies transplantation techniques are generally known in the art. For example, RNA-guided DNA nucleases can be delivered using via engineered AAV capsid polynucleotides, vectors, engineered cells, and/or engineered AAV capsid particles described herein and can be used to knockout, knockdown or disrupt selected genes in an organ for transplant (e.g. ex vivo (e.g. after harvest but before transplantation) or in vivo (in donor or recipient)), animal, such as a transgenic pig (such as the human heme oxygenase-1 transgenic pig line), for example by disrupting expression of genes that encode epitopes recognized by the human immune system, i.e. xenoantigen genes. Candidate porcine genes for disruption may for example include α(1,3)-galactosyltransferase and cytidine monophosphate-N-acetylneuraminic acid hydroxylase genes (see PCT Patent Publication WO 2014/066505). In addition, genes encoding endogenous retroviruses may be disrupted, for example the genes encoding all porcine endogenous retroviruses (see Yang et al., 2015, Genome-wide inactivation of porcine endogenous retroviruses (PERVs), Science 27 Nov. 2015: Vol. 350 no. 6264 pp. 1101-1104). In addition, RNA-guided DNA nucleases may be used to target a site for integration of additional genes in xenotransplant donor animals, such as a human CD55 gene to improve protection against hyperacute rejection.

[0495] Where it is interspecies transplantation (such as human to human) the engineered AAV capsid system molecules, vectors, engineered cells, and/or engineered delivery particles described herein, can be used to deliver cargo polynucleotides and/or otherwise be involved to modify the tissue to be transplanted. In some embodiments, the modification can include modifying one or more HLA antigens or other tissue type determinants, such that the immunogenic profile is more similar or identical to the recipient's immunogenic profile than to the donor's so as to reduce the occurrence of rejection by the recipient. Relevant tissue type determinants are known in the art (such as those used to determine organ matching) and techniques to determine the immunogenic profile (which is made up of the expression signature of the tissue type determinants) are generally known in the art.

[0496] In some embodiments, the donor (such as before harvest) or recipient (after transplantation) can receive one or more of the engineered AAV capsid system molecules, vectors, engineered cells, and/or engineered delivery particles described herein that are capable of modifying the immunogenic profile of the transplanted cells, tissue, and/or organ. In some embodiments, the transplanted cells, tissue, and/or organ can be harvested from the donor and the engineered AAV capsid system molecules, vectors, engineered cells, and/or engineered delivery particles described herein capable of modifying the harvested cells, tissue, and/or organ to be, for example, less immunogenic or be modified to have some specific characteristic when transplanted in the recipient can be delivered to the harvested cells, tissue, and/or organ ex vivo. After delivery the cells, tissue, and/or organs can be transplanted into the donor.

Gene Modification and Treatment of Diseases with Genetic or Epigenetic Embodiments

[0497] The engineered delivery system molecules, vectors, engineered cells, and/or engineered delivery particles described herein can be used to modify genes or other polynucleotides and/or treat diseases with genetic and/or epigenetic embodiments. As described elsewhere herein the cargo molecule can be a polynucleotide that can be delivered to a cell and, in some embodiments, be integrated into the genome of the cell. In some embodiments, the cargo molecule(s) can be one or more CRISPR-Cas system components. In some embodiments, the CRISPR-Cas components, when delivered by an engineered AAV capsid particles described herein can be optionally expressed in the recipient cell and act to modify the genome of the recipient cell in a sequence specific manner. In some embodiments, the cargo molecules that can be packaged and delivered by the engineered AAV capsid particles described herein can facilitate/mediate genome modification via a method that is not dependent on CRISPR-Cas. Such non-CRISPR-Cas genome modification systems will instantly be appreciated by those of ordinary skill in the art and are also, at least in part, described elsewhere herein. In some embodiments, modification is at a specific target sequence. In other embodiments, modification is at locations that appear to be random throughout the genome.

[0498] Examples of disease-associated genes and polynucleotides and disease specific information is available from McKusick-Nathans Institute of Genetic Medicine, Johns Hopkins University (Baltimore, Md.) and National Center for Biotechnology Information, National Library of Medicine (Bethesda, Md.), available on the World Wide Web. Any of these can be appropriate to be treated by one or more of the methods described herein.

[0499] More specifically, Mutations in these genes and pathways can result in production of improper proteins or proteins in improper amounts which affect function. Further examples of genes, diseases and proteins are hereby incorporated by reference from U.S. Provisional Application No. 61/736,527 filed Dec. 12, 2012. Such genes, proteins and pathways may be the target polynucleotide of a CRISPR complex of the present invention. Examples of disease-associated genes and polynucleotides are listed in Tables A and B. Examples of signaling biochemical pathway-associated genes and polynucleotides are listed in Table C. Additional examples are discussed elsewhere herein.

TABLE A

| DISEASE/DISORDERS | GENE(S) |
|---|---|
| Neoplasia | PTEN; ATM; ATR; EGFR; ERBB2; ERBB3; ERBB4; |
| | Notch1; Notch2; Notch3; Notch4; AKT; AKT2; AKT3; HIF; |
| | HIF1a; HIF3a; Met; HRG; Bcl2; PPAR alpha; PPAR |
| | gamma; WT1 (Wilms Tumor); FGF Receptor Family |
| | members (5 members: 1, 2, 3, 4, 5); CDKN2a; APC; RB |
| | (retinoblastoma); MEN1; VHL; BRCA1; BRCA2; AR |
| | (Androgen Receptor); TSG101; IGF; IGF Receptor; Igf1 |
| | (4 variants); Igf2 (3 variants); Igf1 Receptor; Igf2 Receptor; |
| | Bax; Bcl2; caspases family (9 members: |
| | 1, 2, 3, 4, 6, 7, 8, 9, 12); Kras; Apc |
| Age-related Macular | Aber; Ccl2; Cc2; cp (ceruloplasmin); Timp3; cathepsinD; |
| Degeneration | Vldlr; Ccr2 |
| Schizophrenia | Neuregulin1 (Nrg1); Erb4 (receptor for Neuregulin); |
| | Complexin1 (Cplx1); Tph1 Tryptophan hydroxylase; Tph2 |
| | Tryptophan hydroxylase 2; Neurexin 1; GSK3; GSK3a; |
| | GSK3b |
| Disorders | 5-HTT (Slc6a4); COMT; DRD (Drd1a); SLC6A3; DAOA; |
| | DTNBP1; Dao(Dao1) |
| Trinucleotide Repeat | HTT (Huntington’s Dx); SBMA/SMAX1/AR (Kennedy’s |
| Disorders | Dx); FXN/X25 (Friedrich’s Ataxia); ATX3 (Machado- |
| | Joseph’s Dx); ATXN1 and ATXN2 (spinocerebellar |
| | ataxias); DMPK (myotonic dystrophy); Atrophin-1 and Atn1 |
| | (DRPLA Dx); CBP (Creb-BPglobal instability); VLDLR |
| | (Alzheimer’s); Atxn7; Atxn10 |
| Fragile X Syndrome | FMR2; FXR1; FXR2; mGLUR5 |
| Secretase Related | APH-1 (alpha and beta); Presenilin (Psen1); nicastrin |
| Disorders | (Ncstn); PEN-2 |
| Others | Nos1; Parp1; Nat1; Nat2 |
| Prion-related disorders | Prp |
| ALS | SOD1; ALS2; STEX; FUS; TARDBP; VEGF (VEGF-a; |
| | VEGF-b; VEGF-c) |
| Drug addiction | Prkce (alcohol); Drd2; Drd4; ABAT (alcohol); GRIA2; |
| | Grm5; Grin1; Htr1b; Grin2a; Drd3; Pdyn; Gria1 (alcohol) |
| Autism | Mecp2; BZRAP1; MDGA2; Sema5A; Neurexin 1; Fragile X |
| | (FMR2 (AFF2); FXR1; FXR2; Mglur5) |
| Alzheimer’s | E1; CHIP; UCH; UBB; Tau; LRP; PICALM; Clusterin; PS1; |
| Disease | SORL1; CR1; Vldlr; Uba1; Uba3; CHIP28 (Aqp1, Aquaporin 1); |
| | Uchl1; Uchl3; APP |
| Inflammation | IL-10; IL-1 (IL-1a; IL-1b); IL-13; IL-17 (IL-17a (CTLA8); |
| | IL-17b; IL-17c; IL-17d; IL-17f); II-23; Cx3cr1; ptpn22; TNFa; |
| | NOD2/CARD15 for IBD; IL-6; IL-12 (IL-12a; IL-12b); |
| | CTLA4; Cx3cl1 |
| Parkinson’s Disease | x-Synuclein; DJ-1; LRRK2; Parkin; PINK1 |

TABLE B

| | |
|---|---|
| Blood and | Anemia (CDAN1, CDA1, RPS19, DBA, PKLR, PK1, NT5C3, |
| coagulation diseases | UMPH1, PSN1, RHAG, RH50A, NRAMP2, SPTB, ALAS2, ANH1, |
| and disorders | ASB, ABCB7, ABC7, ASAT); Bare lymphocyte syndrome (TAPBP, |
| | TPSN, TAP2, ABCB3, PSF2, RING11, MHC2TA, C2TA, RFX5, |
| | RFXAP, RFX5), Bleeding disorders (TBXA2R, P2RX1, P2X1); Factor |
| | H and factor H-like 1 (HF1, CFH, HUS); Factor V and factor VIII |
| | (MCFD2); Factor VII deficiency (F7); Factor X deficiency (F10); |
| | Factor XI deficiency (F11); Factor XII deficiency (F12, HAF); Factor |
| | XIIIA deficiency (F13A1, F13A); Factor XIIIB deficiency (F13B); |
| | Fanconi anemia (FANCA, FACA, FA1, FA, FAA, FAAP95, FAAP90, |
| | FLJ34064, FANCB, FANCC, FACC, BRCA2, FANCD1, FANCD2, |
| | FANCD, FACD, FAD, FANCE, FACE, FANCF, XRCC9, FANCG, |
| | BRIP1, BACH1, FANCJ, PHF9, FANCL, FANCM, KIAA1596); |
| | Hemophagocytic lymphohistiocytosis disorders (PRF1, HPLH2, |
| | UNC13D, MUNC13-4, HPLH3, HLH3, FHL3); Hemophilia A (F8, |
| | F8C, HEMA); Hemophilia B (F9, HEMB), Hemorrhagic disorders |
| | (PI, ATT, F5); Leukocyte deficiencies and disorders (ITGB2, CD18, |
| | LCAMB, LAD, EIF2B1, EIF2BA, EIF2B2, EIF2B3, EIF2B5, LVWM, |
| | CACH, CLE, EIF2B4); Sickle cell anemia (HBB); Thalassemia |
| | (HBA2, HBB, HBD, LCRB, HBA1). |
| Cell dysregulation | B-cell non-Hodgkin lymphoma (BCL7A, BCL7); Leukemia (TAL1, |
| and oncology | TCL5, SCL, TAL2, FLT3, NBS1, NBS, ZNFN1A1, IK1, LYF1, |
| diseases and | HOXD4, HOX4B, BCR, CML, PHL, ALL, ARNT, KRAS2, RASK2, |
| disorders | GMPS, AF10, ARHGEF12, LARG, KIAA0382, CALM, CLTH, |
| | CEBPA, CEBP, CHIC2, BTL, FLT3, KIT, PBT, LPP, NPM1, |
| | NUP214, D9S46E, CAN, CAIN, RUNX1, CBFA2, AML1, |
| | WHSC1L1, NSD3, FLT3, AF1Q, NPM1, NUMA1, ZNF145, PLZF, |
| | PML, MYL, STAT5B, AF10, CALM, CLTH, ARL11, ARLTS1, |
| | P2RX7, P2X7, BCR, CML, PHL, ALL, GRAF, NF1, VRNF, WSS, |
| | NFNS, PTPN11, PTP2C, SHP2, NS1, BCL2, CCND1, PRAD1, BCL1, |
| | TCRA, GATA1, GF1, ERYF1, NFE1, ABL1, NQO1, DIA4, NMOR1, |
| | NUP214, D9S46E, CAN, CAIN). |
| Inflammation and | AIDS (KIR3DL1, NKAT3, NKB1, AMB11, KIR3DS1, IFNG, |
| immune related | CXCL12, SDF1); Autoimmune lymphoproliferative syndrome |
| diseases and | (TNFRSF6, APT1, FAS, CD95, ALPS1A); Combined |
| disorders | immunodeficiency, (IL2RG, SCIDX1, SCIDX, IMD4); HIV-1 (CCL5, |
| | SCYA5, D17S136E, TCP228), HIV susceptibility or infection (IL10, |
| | CSIF, CMKBR2, CCR2, CMKBR5, CCCKR5 (CCR5)); |
| | Immunodeficiencies (CD3E, CD3G, AICDA, AID, HIGM2, |
| | TNFRSF5, CD40, UNG, DGU, HIGM4, TNFSF5, CD40LG, HIGM1, |
| | IGM, FOXP3, IPEX, AIID, XPID, PIDX, TNFRSF14B, TACI); |
| | Inflammation (IL-10, IL-1 (IL-1a, IL-1b), IL-13, IL-17 (IL-17a |
| | (CTLA8), IL-17b, IL-17c, IL-17d, IL-17f), II-23, Cx3cr1, ptpn22, |
| | TNFa, NOD2/CARD15 for IBD, IL-6, IL-12 (IL-12a, IL-12b), |
| | CTLA4, Cx3cl1); Severe combined immunodeficiencies |
| | (SCIDs)(JAK3, JAKL, DCLRE1C, ARTEMIS, SCIDA, RAG1, |
| | RAG2, ADA, PTPRC, CD45, LCA, IL7R, CD3D, T3D, IL2RG, |
| | SCIDX1, SCIDX, IMD4). |
| Metabolic, liver, | Amyloid neuropathy (TTR, PALB); Amyloidosis (APOA1, APP, |
| kidney and protein | AAA, CVAP, AD1, GSN, FGA, LYZ, TTR, PALB); Cirrhosis |
| diseases and | (KRT18, KRT8, CIRH1A, NAIC, TEX292, KIAA1988); Cystic |
| disorders | fibrosis (CFTR, ABCC7, CF, MRP7); Glycogen storage diseases |
| | (SLC2A2, GLUT2, G6PC, G6PT, G6PT1, GAA, LAMP2, LAMPB, |
| | AGL, GDE, GBE1, GYS2, PYGL, PFKM); Hepatic adenoma, 142330 |
| | (TCF1, HNF1A, MODY3), Hepatic failure, early onset, and neurologic |
| | disorder (SCOD1, SCO1), Hepatic lipase deficiency (LIPC), |
| | Hepatoblastoma, cancer and carcinomas (CTNNB1, PDGFRL, |
| | PDGRL, PRLTS, AXIN1, AXIN, CTNNB1, TP53, P53, LFS1, IGF2R, |
| | MPRI, MET, CASP8, MCH5; Medullary cystic kidney disease |
| | (UMOD, HNFJ, FJHN, MCKD2, ADMCKD2); Phenylketonuria |
| | (PAH, PKU1, QDPR, DHPR, PTS); Polycystic kidney and hepatic |
| | disease (FCYT, PKHD1, ARPKD, PKD1, PKD2, PKD4, PKDTS, |
| | PRKCSH, G19P1, PCLD, SEC63). |
| Muscular/Skeletal | Becker muscular dystrophy (DMD, BMD, MYF6), Duchenne |
| diseases and | Muscular Dystrophy (DMD, BMD); Emery-Dreifuss muscular |
| disorders | dystrophy (LMNA, LMN1, EMD2, FPLD, CMD1A, HGPS, |
| | LGMD1B, LMNA, LMN1, EMD2, FPLD, CMD1A); |
| | Facioscapulohumeral muscular dystrophy (FSHMD1A, FSHD1A); |
| | Muscular dystrophy (FKRP, MDC1C, LGMD2I, LAMA2, LAMM, |
| | LARGE, KIAA0609, MDC1D, FCMD, TTID, MYOT, CAPN3, |
| | CANP3, DYSF, LGMD2B, SGCG, LGMD2C, DMDA1, SCG3, |
| | SGCA, ADL, DAG2, LGMD2D, DMDA2, SGCB, LGMD2E, SGCD, |
| | SGD, LGMD2F, CMD1L, TCAP, LGMD2G, CMD1N, TRIM32, |
| | HT2A, LGMD2H, FKRP, MDC1C, LGMD2I, TTN, CMD1G, TMD, |
| | LGMD2J, POMT1, CAV3, LGMD1C, SEPN1, SELN, RSMD1, |
| | PLEC1, PLTN, EBS1); Osteopetrosis (LRP5, BMND1, LRP7, LR3, |
| | OPPG, VBCH2, CLCN7, CLC7, OPTA2, OSTM1, GL, TCIRG1, |
| | TIRC7, OC116, OPTB1); Muscular atrophy (VAPB, VAPC, ALS8, |
| | SMN1, SMA1, SMA2, SMA3, SMA4, BSCL2, SPG17, GARS, |
| | SMAD1, CMT2D, HEXB, IGHMBP2, SMUBP2, CATF1, SMARD1). |
| Neurological and | ALS (SOD1, ALS2, STEX, FUS, TARDBP, VEGF (VEGF-a, VEGF-b, |
| neuronal diseases | VEGF-c); Alzheimer disease (APP, AAA, CVAP, AD1, APOE, |
| and disorders | AD2, PSEN2, AD4, STM2, APBB2, FE65L1, NOS3, PLAU, URK, |
| | ACE, DCP1, ACE1, MPO, PACIP1, PAXIP1L, PTIP, A2M, BLMH, |
| | BMH, PSEN1, AD3); Autism (Mecp2, BZRAP1, MDGA2, Sema5A, |
| | Neurexin 1, GLO1, MECP2, RTT, PPMX, MRX16, MRX79, NLGN3, |
| | NLGN4, KIAA1260, AUTSX2); Fragile X Syndrome (FMR2, FXR1, |
| | FXR2, mGLUR5); Huntington’s disease and disease like disorders |
| | (HD, IT15, PRNP, PRIP, JPH3, JP3, HDL2, TBP, SCA17); Parkinson |
| | disease (NR4A2, NURR1, NOT, TINUR, SNCAIP, TBP, SCA17, |
| | SNCA, NACP, PARK1, PARK4, DJ1, PARK7, LRRK2, PARK8, |
| | PINK1, PARK6, UCHL1, PARK5, SNCA, NACP, PARK1, PARK4, |
| | PRKN, PARK2, PDJ, DBH, NDUFV2); Rett syndrome (MECP2, |
| | RTT, PPMX, MRX16, MRX79, CDKL5, STK9, MECP2, RTT, |
| | PPMX, MRX16, MRX79, x-Synuclein, DJ-1); Schizophrenia |
| | (Neuregulin1 (Nrg1), Erb4 (receptor for Neuregulin), Complexin1 |
| | (Cplx1), Tph1 Tryptophan hydroxylase, Tph2, Tryptophan hydroxylase |
| | 2, Neurexin 1, GSK3, GSK3a, GSK3b, 5-HTT (Slc6a4), COMT, DRD |
| | (Drd1a), SLC6A3, DAOA, DTNBP1, Dao (Dao1)); Secretase Related |
| | Disorders (APH-1 (alpha and beta), Presenilin (Psen1), nicastrin, |
| | (Nesta), PEN-2, Nos1, Parp1, Nat1, Nat2); Trinucleotide Repeat |
| | Disorders (HTT (Huntington’s Dx), SBMA/SMAX1/AR (Kennedy’s |
| | Dx), FXN/X25 (Friedrich’s Ataxia), ATX3 (Machado-Joseph’s Dx), |
| | ATXN1 and ATXN2 (spinocerebellar ataxias), DMPK (myotonic |
| | dystrophy), Atrophin-1 and Atn1 (DRPLA Dx), CBP (Creb-BP-global |
| | instability), VLDLR (Alzheimer’s), Atxn7, Atxn10). |
| Ocular diseases and | Age-related macular degeneration (Aber, Ccl2, Cc2, cp |
| disorders | (ceruloplasmin), Timp3, cathepsinD, Vldlr, Ccr2); Cataract (CRYAA, |
| | CRYA1, CRYBB2, CRYB2, PITX3, BFSP2, CP49, CP47, CRYAA, |
| | CRYA1, PAX6, AN2, MGDA, CRYBA1, CRYB1, CRYGC, CRYG3, |
| | CCL, LIM2, MP19, CRYGD, CRYG4, BFSP2, CP49, CP47, HSF4, |
| | CTM, HSF4, CTM, MIP, AQP0, CRYAB, CRYA2, CTPP2, |
| | CRYBB1, CRYGD, CRYG4, CRYBB2, CRYB2, CRYGC, CRYG3, |
| | CCL, CRYAA, CRYA1, GJA8, CX50, CAE1, GJA3, CX46, CZP3, |
| | CAE3, CCM1, CAM, KRIT1); Corneal clouding and dystrophy |
| | (APOA1, TGFBI, CSD2, CDGG1, CSD, BIGH3, CDG2, TACSTD2, |
| | TROP2, M1S1, VSX1, RINX, PPCD, PPD, KTCN, COL8A2, FECD, |
| | PPCD2, PIP5K3, CFD); Cornea plana congenital (KERA, CNA2); |
| | Glaucoma (MYOC, TIGR, GLC1A, JOAG, GPOA, OPTN, GLC1E, |
| | FIP2, HYPL, NRP, CYP1B1, GLC3A, OPA1, NTG, NPG, CYP1B1, |
| | GLC3A); Leber congenital amaurosis (CRB1, RP12, CRX, CORD2, |
| | CRD, RPGRIP1, LCA6, CORD9, RPE65, RP20, AIPL1, LCA4, |
| | GUCY2D, GUC2D, LCA1, CORD6, RDH12, LCA3); Macular |
| | dystrophy (ELOVL4, ADMD, STGD2, STGD3, RDS, RP7, PRPH2, |
| | PRPH, AVMD, AOFMD, VMD2). |

TABLE C

| CELLULAR | |
|---|---|
| FUNCTION | GENES |
| PI3K/AKT Signaling | PRKCE; ITGAM; ITGA5; IRAK1; PRKAA2; EIF2AK2; |
| | PTEN; EIF4E; PRKCZ; GRK6; MAPK1; TSC1; PLK1; |
| | AKT2; IKBKB; PIK3CA; CDK8; CDKN1B; NFKB2; BCL2; |
| | PIK3CB; PPP2R1A; MAPK8; BCL2L1; MAPK3; TSC2; |
| | ITGA1; KRAS; EIF4EBP1; RELA; PRKCD; NOS3; |
| | PRKAA1; MAPK9; CDK2; PPP2CA; PIM1; ITGB7; |
| | YWHAZ; ILK; TP53; RAF1; IKBKG; RELB; DYRK1A; |
| | CDKN1A; ITGB1; MAP2K2; JAK1; AKT1; JAK2; PIK3R1; |
| | CHUK; PDPK1; PPP2R5C; CTNNB1; MAP2K1; NFKB1; |
| | PAK3; ITGB3; CCND1; GSK3A; FRAP1; SFN; ITGA2; |
| | TTK; CSNK1A1; BRAF; GSK3B; AKT3; FOXO1; SGK; |
| | HSP90AA1; RPS6KB1 |
| ERK/MAPK Signaling | PRKCE; ITGAM; ITGA5; HSPB1; IRAK1; PRKAA2; |
| | EIF2AK2; RAC1; RAP1A; TLN1; EIF4E; ELK1; GRK6; |
| | MAPK1; RAC2; PLK1; AKT2; PIK3CA; CDK8; CREB1; |
| | PRKCI; PTK2; FOS; RPS6KA4; PIK3CB; PPP2R1A; |
| | PIK3C3; MAPK8; MAPK3; ITGA1; ETS1; KRAS; MYCN; |
| | EIF4EBP1; PPARG; PRKCD; PRKAA1; MAPK9; SRC; |
| | CDK2; PPP2CA; PIM1; PIK3C2A; ITGB7; YWHAZ; |
| | PPP1CC; KSR1; PXN; RAF1; FYN; DYRK1A; ITGB1; |
| | MAP2K2; PAK4; PIK3R1; STAT3; PPP2R5C; MAP2K1; |
| | PAK3; ITGB3; ESR1; ITGA2; MYC; TTK; CSNK1A1; |
| | CRKL; BRAF; ATF4; PRKCA; SRF; STAT1; SGK |
| Glucocorticoid Receptor | RAC1; TAF4B; EP300; SMAD2; TRAF6; PCAF; ELK1; |
| Signaling | MAPK1; SMAD3; AKT2; IKBKB; NCOR2; UBE2I; |
| | PIK3CA; CREB1; FOS; HSPA5; NFKB2; BCL2; |
| | MAP3K14; STAT5B; PIK3CB; PIK3C3; MAPK8; BCL2L1; |
| | MAPK3; TSC22D3; MAPK10; NRIP1; KRAS; MAPK13; |
| | RELA; STAT5A; MAPK9; NOS2A; PBX1; NR3C1; |
| | PIK3C2A; CDKN1C; TRAF2; SERPINE1; NCOA3; |
| | MAPK14; TNF; RAF1; IKBKG; MAP3K7; CREBBP; |
| | CDKN1A; MAP2K2; JAK1; IL8; NCOA2; AKT1; JAK2; |
| | PIK3R1; CHUK; STAT3; MAP2K1; NFKB1; TGFBR1; |
| | ESR1; SMAD4; CEBPB; JUN; AR; AKT3; CCL2; MMP1; |
| | STAT1; IL6; HSP90AA1 |
| Axonal Guidance | PRKCE; ITGAM; ROCK1; ITGA5; CXCR4; ADAM12; |
| Signaling | IGF1; RAC1; RAP1A; EIF4E; PRKCZ; NRP1; NTRK2; |
| | ARHGEF7; SMO; ROCK2; MAPK1; PGF; RAC2; |
| | PTPN11; GNAS; AKT2; PIK3CA; ERBB2; PRKCI; PTK2; |
| | CFL1; GNAQ; PIK3CB; CXCL12; PIK3C3; WNT11; |
| | PRKD1; GNB2L1; ABL1; MAPK3; ITGA1; KRAS; RHOA; |
| | PRKCD; PIK3C2A; ITGB7; GLI2; PXN; VASP; RAF1; |
| | FYN; ITGB1; MAP2K2; PAK4; ADAM17; AKT1; PIK3R1; |
| | GLI1; WNT5A; ADAM10; MAP2K1; PAK3; ITGB3; |
| | CDC42; VEGFA; ITGA2; EPHA8; CRKL; RND1; GSK3B; |
| | AKT3; PRKCA |
| Ephrin Receptor | PRKCE; ITGAM; ROCK1; ITGA5; CXCR4; IRAK1; |
| Signaling | PRKAA2; EIF2AK2; RAC1; RAP1A; GRK6; ROCK2; |
| | MAPK1; PGF; RAC2; PTPN11; GNAS; PLK1; AKT2; |
| | DOK1; CDK8; CREB1; PTK2; CFL1; GNAQ; MAP3K14; |
| | CXCL12; MAPK8; GNB2L1; ABL1; MAPK3; ITGA1; |
| | KRAS; RHOA; PRKCD; PRKAA1; MAPK9; SRC; CDK2; |
| | PIM1; ITGB7; PXN; RAF1; FYN; DYRK1A; ITGB1; |
| | MAP2K2; PAK4; AKT1; JAK2; STAT3; ADAM10; |
| | MAP2K1; PAK3; ITGB3; CDC42; VEGFA; ITGA2; |
| | EPHA8; TTK; CSNK1A1; CRKL; BRAF; PTPN13; ATF4; |
| | AKT3; SGK |
| Actin Cytoskeleton | ACTN4; PRKCE; ITGAM; ROCK1; ITGA5; IRAK1; |
| Signaling | PRKAA2; EIF2AK2; RAC1; INS; ARHGEF7; GRK6; |
| | ROCK2; MAPK1; RAC2; PLK1; AKT2; PIK3CA; CDK8; |
| | PTK2; CFL1; PIK3CB; MYH9; DIAPH1; PIK3C3; MAPK8; |
| | F2R; MAPK3; SLC9A1; ITGA1; KRAS; RHOA; PRKCD; |
| | PRKAA1; MAPK9; CDK2; PIM1; PIK3C2A; ITGB7; |
| | PPP1CC; PXN; VIL2; RAF1; GSN; DYRK1A; ITGB1; |
| | MAP2K2; PAK4; PIP5K1A; PIK3R1; MAP2K1; PAK3; |
| | ITGB3; CDC42; APC; ITGA2; TTK; CSNK1A1; CRKL; |
| | BRAF; VAV3; SGK |
| Huntington’s Disease | PRKCE; IGF1; EP300; RCOR1; PRKCZ; HDAC4; TGM2; |
| Signaling | MAPK1; CAPNS1; AKT2; EGFR; NCOR2; SP1; CAPN2; |
| | PIK3CA; HDAC5; CREB1; PRKCI; HSPA5; REST; |
| | GNAQ; PIK3CB; PIK3C3; MAPK8; IGF1R; PRKD1; |
| | GNB2L1; BCL2L1; CAPN1; MAPK3; CASP8; HDAC2; |
| | HDAC7A; PRKCD; HDAC11; MAPK9; HDAC9; PIK3C2A; |
| | HDAC3; TP53; CASP9; CREBBP; AKT1; PIK3R1; |
| | PDPK1; CASP1; APAF1; FRAP1; CASP2; JUN; BAX; |
| | ATF4; AKT3; PRKCA; CLTC; SGK; HDAC6; CASP3 |
| Apoptosis Signaling | PRKCE; ROCK1; BID; IRAK1; PRKAA2; EIF2AK2; BAK1; |
| | BIRC4; GRK6; MAPK1; CAPNS1; PLK1; AKT2; IKBKB; |
| | CAPN2; CDK8; FAS; NFKB2; BCL2; MAP3K14; MAPK8; |
| | BCL2L1; CAPN1; MAPK3; CASP8; KRAS; RELA; |
| | PRKCD; PRKAA1; MAPK9; CDK2; PIM1; TP53; TNF; |
| | RAF1; IKBKG; RELB; CASP9; DYRK1A; MAP2K2; |
| | CHUK; APAF1; MAP2K1; NFKB1; PAK3; LMNA; CASP2; |
| | BIRC2; TTK; CSNK1A1; BRAF; BAX; PRKCA; SGK; |
| | CASP3; BIRC3; PARP1 |
| B Cell Receptor | RAC1; PTEN; LYN; ELK1; MAPK1; RAC2; PTPN11; |
| Signaling | AKT2; IKBKB; PIK3CA; CREB1; SYK; NFKB2; CAMK2A; |
| | MAP3K14; PIK3CB; PIK3C3; MAPK8; BCL2L1; ABL1; |
| | MAPK3; ETS1; KRAS; MAPK13; RELA; PTPN6; MAPK9; |
| | EGR1; PIK3C2A; BTK; MAPK14; RAF1; IKBKG; RELB; |
| | MAP3K7; MAP2K2; AKT1; PIK3R1; CHUK; MAP2K1; |
| | NFKB1; CDC42; GSK3A; FRAP1; BCL6; BCL10; JUN; |
| | GSK3B; ATF4; AKT3; VAV3; RPS6KB1 |
| Leukocyte Extravasation | ACTN4; CD44; PRKCE; ITGAM; ROCK1; CXCR4; CYBA; |
| Signaling | RAC1; RAP1A; PRKCZ; ROCK2; RAC2; PTPN11; |
| | MMP14; PIK3CA; PRKCI; PTK2; PIK3CB; CXCL12; |
| | PIK3C3; MAPK8; PRKD1; ABL1; MAPK10; CYBB; |
| | MAPK13; RHOA; PRKCD; MAPK9; SRC; PIK3C2A; BTK; |
| | MAPK14; NOX1; PXN; VIL2; VASP; ITGB1; MAP2K2; |
| | CTNND1; PIK3R1; CTNNB1; CLDN1; CDC42; F11R; ITK; |
| | CRKL; VAV3; CTTN; PRKCA; MMP1; MMP9 |
| Integrin Signaling | ACTN4; ITGAM; ROCK1; ITGA5; RAC1; PTEN; RAP1A; |
| | TLN1; ARHGEF7; MAPK1; RAC2; CAPNS1; AKT2; |
| | CAPN2; PIK3CA; PTK2; PIK3CB; PIK3C3; MAPK8; |
| | CAV1; CAPN1; ABL1; MAPK3; ITGA1; KRAS; RHOA; |
| | SRC; PIK3C2A; ITGB7; PPP1CC; ILK; PXN; VASP; |
| | RAF1; FYN; ITGB1; MAP2K2; PAK4; AKT1; PIK3R1; |
| | TNK2; MAP2K1; PAK3; ITGB3; CDC42; RND3; ITGA2; |
| | CRKL; BRAF; GSK3B; AKT3 |
| Acute Phase Response | IRAK1; SOD2; MYD88; TRAF6; ELK1; MAPK1; PTPN11; |
| Signaling | AKT2; IKBKB; PIK3CA; FOS; NFKB2; MAP3K14; |
| | PIK3CB; MAPK8; RIPK1; MAPK3; IL6ST; KRAS; |
| | MAPK13; IL6R; RELA; SOCS1; MAPK9; FTL; NR3C1; |
| | TRAF2; SERPINE1; MAPK14; TNF; RAF1; PDK1; |
| | IKBKG; RELB; MAP3K7; MAP2K2; AKT1; JAK2; PIK3R1; |
| | CHUK; STAT3; MAP2K1; NFKB1; FRAP1; CEBPB; JUN; |
| | AKT3; IL1R1; IL6 |
| PTEN Signaling | ITGAM; ITGA5; RAC1; PTEN; PRKCZ; BCL2L11; |
| | MAPK1; RAC2; AKT2; EGFR; IKBKB; CBL; PIK3CA; |
| | CDKN1B; PTK2; NFKB2; BCL2; PIK3CB; BCL2L1; |
| | MAPK3; ITGA1; KRAS; ITGB7; ILK; PDGFRB; INSR; |
| | RAF1; IKBKG; CASP9; CDKN1A; ITGB1; MAP2K2; |
| | AKT1; PIK3R1; CHUK; PDGFRA; PDPK1; MAP2K1; |
| | NFKB1; ITGB3; CDC42; CCND1; GSK3A; ITGA2; |
| | GSK3B; AKT3; FOXO1; CASP3; RPS6KB1 |
| p53 Signaling | PTEN; EP300; BBC3; PCAF; FASN; BRCA1; GADD45A; |
| | BIRC5; AKT2; PIK3CA; CHEK1; TP53INP1; BCL2; |
| | PIK3CB; PIK3C3; MAPK8; THBS1; ATR; BCL2L1; E2F1; |
| | PMAIP1; CHEK2; TNFRSF10B; TP73; RB1; HDAC9; |
| | CDK2; PIK3C2A; MAPK14; TP53; LRDD; CDKN1A; |
| | HIPK2; AKT1; PIK3R1; RRM2B; APAF1; CTNNB1; |
| | SIRT1; CCND1; PRKDC; ATM; SFN; CDKN2A; JUN; |
| | SNAI2; GSK3B; BAX; AKT3 |
| Aryl Hydrocarbon | HSPB1; EP300; FASN; TGM2; RXRA; MAPK1; NQO1; |
| Receptor Signaling | NCOR2; SP1; ARNT; CDKN1B; FOS; CHEK1; |
| | SMARCA4; NFKB2; MAPK8; ALDH1A1; ATR; E2F1; |
| | MAPK3; NRIP1; CHEK2; RELA; TP73; GSTP1; RB1; |
| | SRC; CDK2; AHR; NFE2L2; NCOA3; TP53; TNF; |
| | CDKN1A; NCOA2; APAF1; NFKB1; CCND1; ATM; ESR1; |
| | CDKN2A; MYC; JUN; ESR2; BAX; IL6; CYP1B1; |
| | HSP90AA1 |
| Xenobiotic Metabolism | PRKCE; EP300; PRKCZ; RXRA; MAPK1; NQO1; |
| Signaling | NCOR2; PIK3CA; ARNT; PRKCI; NFKB2; CAMK2A; |
| | PIK3CB; PPP2R1A; PIK3C3; MAPK8; PRKD1; |
| | ALDH1A1; MAPK3; NRIP1; KRAS; MAPK13; PRKCD; |
| | GSTP1; MAPK9; NOS2A; ABCB1; AHR; PPP2CA; FTL; |
| | NFE2L2; PIK3C2A; PPARGC1A; MAPK14; TNF; RAF1; |
| | CREBBP; MAP2K2; PIK3R1; PPP2R5C; MAP2K1; |
| | NFKB1; KEAP1; PRKCA; EIF2AK3; IL6; CYP1B1; |
| | HSP90AA1 |
| SAPK/JNK Signaling | PRKCE; IRAK1; PRKAA2; EIF2AK2; RAC1; ELK1; |
| | GRK6; MAPK1; GADD45A; RAC2; PLK1; AKT2; PIK3CA; |
| | FADD; CDK8; PIK3CB; PIK3C3; MAPK8; RIPK1; |
| | GNB2L1; IRS1; MAPK3; MAPK10; DAXX; KRAS; |
| | PRKCD; PRKAA1; MAPK9; CDK2; PIM1; PIK3C2A; |
| | TRAF2; TP53; LCK; MAP3K7; DYRK1A; MAP2K2; |
| | PIK3R1; MAP2K1; PAK3; CDC42; JUN; TTK; CSNK1A1; |
| | CRKL; BRAF; SGK |
| PPAr/RXR Signaling | PRKAA2; EP300; INS; SMAD2; TRAF6; PPARA; FASN; |
| | RXRA; MAPK1; SMAD3; GNAS; IKBKB; NCOR2; |
| | ABCA1; GNAQ; NFKB2; MAP3K14; STAT5B; MAPK8; |
| | IRS1; MAPK3; KRAS; RELA; PRKAA1; PPARGC1A; |
| | NCOA3; MAPK14; INSR; RAF1; IKBKG; RELB; MAP3K7; |
| | CREBBP; MAP2K2; JAK2; CHUK; MAP2K1; NFKB1; |
| | TGFBR1; SMAD4; JUN; IL1R1; PRKCA; IL6; HSP90AA1; |
| | ADIPOQ |
| NF-KB Signaling | IRAK1; EIF2AK2; EP300; INS; MYD88; PRKCZ; TRAF6; |
| | TBK1; AKT2; EGFR; IKBKB; PIK3CA; BTRC; NFKB2; |
| | MAP3K14; PIK3CB; PIK3C3; MAPK8; RIPK1; HDAC2; |
| | KRAS; RELA; PIK3C2A; TRAF2; TLR4; PDGFRB; TNF; |
| | INSR; LCK; IKBKG; RELB; MAP3K7; CREBBP; AKT1; |
| | PIK3R1; CHUK; PDGFRA; NFKB1; TLR2; BCL10; |
| | GSK3B; AKT3; TNFAIP3; IL1R1 |
| Neuregulin Signaling | ERBB4; PRKCE; ITGAM; ITGA5; PTEN; PRKCZ; ELK1; |
| | MAPK1; PTPN11; AKT2; EGFR; ERBB2; PRKCI; |
| | CDKN1B; STAT5B; PRKD1; MAPK3; ITGA1; KRAS; |
| | PRKCD; STAT5A; SRC; ITGB7; RAF1; ITGB1; MAP2K2; |
| | ADAM17; AKT1; PIK3R1; PDPK1; MAP2K1; ITGB3; |
| | EREG; FRAP1; PSEN1; ITGA2; MYC; NRG1; CRKL; |
| | AKT3; PRKCA; HSP90AA1; RPS6KB1 |
| Wnt & Beta catenin | CD44; EP300; LRP6; DVL3; CSNK1E; GJA1; SMO; |
| Signaling | AKT2; PIN1; CDH1; BTRC; GNAQ; MARK2; PPP2R1A; |
| | WNT11; SRC; DKK1; PPP2CA; SOX6; SFRP2; ILK; |
| | LEF1; SOX9; TP53; MAP3K7; CREBBP; TCF7L2; AKT1; |
| | PPP2R5C; WNT5A; LRP5; CTNNB1; TGFBR1; CCND1; |
| | GSK3A; DVL1; APC; CDKN2A; MYC; CSNK1A1; GSK3B; |
| | AKT3; SOX2 |
| Insulin Receptor | PTEN; INS; EIF4E; PTPN1; PRKCZ; MAPK1; TSC1; |
| Signaling | PTPN11; AKT2; CBL; PIK3CA; PRKCI; PIK3CB; PIK3C3; |
| | MAPK8; IRS1; MAPK3; TSC2; KRAS; EIF4EBP1; |
| | SLC2A4; PIK3C2A; PPP1CC; INSR; RAF1; FYN; |
| | MAP2K2; JAK1; AKT1; JAK2; PIK3R1; PDPK1; MAP2K1; |
| | GSK3A; FRAP1; CRKL; GSK3B; AKT3; FOXO1; SGK; |
| | RPS6KB1 |
| IL-6 Signaling | HSPB1; TRAF6; MAPKAPK2; ELK1; MAPK1; PTPN11; |
| | IKBKB; FOS; NFKB2; MAP3K14; MAPK8; MAPK3; |
| | MAPK10; IL6ST; KRAS; MAPK13; IL6R; RELA; SOCS1; |
| | MAPK9; ABCB1; TRAF2; MAPK14; TNF; RAF1; IKBKG; |
| | RELB; MAP3K7; MAP2K2; IL8; JAK2; CHUK; STAT3; |
| | MAP2K1; NFKB1; CEBPB; JUN; IL1R1; SRF; IL6 |
| Hepatic Cholestasis | PRKCE; IRAK1; INS; MYD88; PRKCZ; TRAF6; PPARA; |
| | RXRA; IKBKB; PRKCI; NFKB2; MAP3K14; MAPK8; |
| | PRKD1; MAPK10; RELA; PRKCD; MAPK9; ABCB1; |
| | TRAF2; TLR4; TNF; INSR; IKBKG; RELB; MAP3K7; IL8; |
| | CHUK; NR1H2; TJP2; NFKB1; ESR1; SREBF1; FGFR4; |
| | JUN; IL1R1; PRKCA; IL6 |
| IGF-1 Signaling | IGF1; PRKCZ; ELK1; MAPK1; PTPN11; NEDD4; AKT2; |
| | PIK3CA; PRKCI; PTK2; FOS; PIK3CB; PIK3C3; MAPK8; |
| | IGF1R; IRS1; MAPK3; IGFBP7; KRAS; PIK3C2A; |
| | YWHAZ; PXN; RAF1; CASP9; MAP2K2; AKT1; PIK3R1; |
| | PDPK1; MAP2K1; IGFBP2; SFN; JUN; CYR61; AKT3; |
| | FOXO1; SRF; CTGF; RPS6KB1 |
| NRF2-mediated | PRKCE; EP300; SOD2; PRKCZ; MAPK1; SQSTM1; |
| Oxidative Stress | NQO1; PIK3CA; PRKCI; FOS; PIK3CB; PIK3C3; MAPK8; |
| Response | PRKD1; MAPK3; KRAS; PRKCD; GSTP1; MAPK9; FTL; |
| | NFE2L2; PIK3C2A; MAPK14; RAF1; MAP3K7; CREBBP; |
| | MAP2K2; AKT1; PIK3R1; MAP2K1; PPIB; JUN; KEAP1; |
| | GSK3B; ATF4; PRKCA; EIF2AK3; HSP90AA1 |
| Hepatic Fibrosis/Hepatic | EDN1; IGF1; KDR; FLT1; SMAD2; FGFR1; MET; PGF; |
| Stellate Cell Activation | SMAD3; EGFR; FAS; CSF1; NFKB2; BCL2; MYH9; |
| | IGF1R; IL6R; RELA; TLR4; PDGFRB; TNF; RELB; IL8; |
| | PDGFRA; NFKB1; TGFBR1; SMAD4; VEGFA; BAX; |
| | IL1R1; CCL2; HGF; MMP1; STAT1; IL6; CTGF; MMP9 |
| PPAR Signaling | EP300; INS; TRAF6; PPARA; RXRA; MAPK1; IKBKB; |
| | NCOR2; FOS; NFKB2; MAP3K14; STAT5B; MAPK3; |
| | NRIP1; KRAS; PPARG; RELA; STAT5A; TRAF2; |
| | PPARGC1A; PDGFRB; TNF; INSR; RAF1; IKBKG; |
| | RELB; MAP3K7; CREBBP; MAP2K2; CHUK; PDGFRA; |
| | MAP2K1; NFKB1; JUN; IL1R1; HSP90AA1 |
| Fc Epsilon RI Signaling | PRKCE; RAC1; PRKCZ; LYN; MAPK1; RAC2; PTPN11; |
| | AKT2; PIK3CA; SYK; PRKCI; PIK3CB; PIK3C3; MAPK8; |
| | PRKD1; MAPK3; MAPK10; KRAS; MAPK13; PRKCD; |
| | MAPK9; PIK3C2A; BTK; MAPK14; TNF; RAF1; FYN; |
| | MAP2K2; AKT1; PIK3R1; PDPK1; MAP2K1; AKT3; |
| | VAV3; PRKCA |
| G-Protein Coupled | PRKCE; RAP1A; RGS16; MAPK1; GNAS; AKT2; IKBKB; |
| Receptor Signaling | PIK3CA; CREB1; GNAQ; NFKB2; CAMK2A; PIK3CB; |
| | PIK3C3; MAPK3; KRAS; RELA; SRC; PIK3C2A; RAF1; |
| | IKBKG; RELB; FYN; MAP2K2; AKT1; PIK3R1; CHUK; |
| | PDPK1; STAT3; MAP2K1; NFKB1; BRAF; ATF4; AKT3; |
| | PRKCA |
| Inositol Phosphate | PRKCE; IRAK1; PRKAA2; EIF2AK2; PTEN; GRK6; |
| Metabolism | MAPK1; PLK1; AKT2; PIK3CA; CDK8; PIK3CB; PIK3C3; |
| | MAPK8; MAPK3; PRKCD; PRKAA1; MAPK9; CDK2; |
| | PIM1; PIK3C2A; DYRK1A; MAP2K2; PIP5K1A; PIK3R1; |
| | MAP2K1; PAK3; ATM; TTK; CSNK1A1; BRAF; SGK |
| PDGF Signaling | EIF2AK2; ELK1; ABL2; MAPK1; PIK3CA; FOS; PIK3CB; |
| | PIK3C3; MAPK8; CAV1; ABL1; MAPK3; KRAS; SRC; |
| | PIK3C2A; PDGFRB; RAF1; MAP2K2; JAK1; JAK2; |
| | PIK3R1; PDGFRA; STAT3; SPHK1; MAP2K1; MYC; |
| | JUN; CRKL; PRKCA; SRF; STAT1; SPHK2 |
| VEGF Signaling | ACTN4; ROCK1; KDR; FLT1; ROCK2; MAPK1; PGF; |
| | AKT2; PIK3CA; ARNT; PTK2; BCL2; PIK3CB; PIK3C3; |
| | BCL2L1; MAPK3; KRAS; HIF1A; NOS3; PIK3C2A; PXN; |
| | RAF1; MAP2K2; ELAVL1; AKT1; PIK3R1; MAP2K1; SFN; |
| | VEGFA; AKT3; FOXO1; PRKCA |
| Natural Killer Cell | PRKCE; RAC1; PRKCZ; MAPK1; RAC2; PTPN11; |
| Signaling | KIR2DL3; AKT2; PIK3CA; SYK; PRKCI; PIK3CB; |
| | PIK3C3; PRKD1; MAPK3; KRAS; PRKCD; PTPN6; |
| | PIK3C2A; LCK; RAF1; FYN; MAP2K2; PAK4; AKT1; |
| | PIK3R1; MAP2K1; PAK3; AKT3; VAV3; PRKCA |
| Cell Cycle: G1/S | HDAC4; SMAD3; SUV39H1; HDAC5; CDKN1B; BTRC; |
| Checkpoint Regulation | ATR; ABL1; E2F1; HDAC2; HDAC7A; RB1; HDAC11; |
| | HDAC9; CDK2; E2F2; HDAC3; TP53; CDKN1A; CCND1; |
| | E2F4; ATM; RBL2; SMAD4; CDKN2A; MYC; NRG1; |
| | GSK3B; RBL1; HDAC6 |
| T Cell Receptor | RAC1; ELK1; MAPK1; IKBKB; CBL; PIK3CA; FOS; |
| Signaling | NFKB2; PIK3CB; PIK3C3; MAPK8; MAPK3; KRAS; |
| | RELA; PIK3C2A; BTK; LCK; RAF1; IKBKG; RELB; FYN; |
| | MAP2K2; PIK3R1; CHUK; MAP2K1; NFKB1; ITK; BCL10; |
| | JUN; VAV3 |
| Death Receptor | CRADD; HSPB1; BID; BIRC4; TBK1; IKBKB; FADD; |
| Signaling | FAS; NFKB2; BCL2; MAP3K14; MAPK8; RIPK1; CASP8; |
| | DAXX; TNFRSF10B; RELA; TRAF2; TNF; IKBKG; RELB; |
| | CASP9; CHUK; APAF1; NFKB1; CASP2; BIRC2; CASP3; |
| | BIRC3 |
| FGF Signaling | RAC1; FGFR1; MET; MAPKAPK2; MAPK1; PTPN11; |
| | AKT2; PIK3CA; CREB1; PIK3CB; PIK3C3; MAPK8; |
| | MAPK3; MAPK13; PTPN6; PIK3C2A; MAPK14; RAF1; |
| | AKT1; PIK3R1; STAT3; MAP2K1; FGFR4; CRKL; ATF4; |
| | AKT3; PRKCA; HGF |
| GM-CSF Signaling | LYN; ELK1; MAPK1; PTPN11; AKT2; PIK3CA; CAMK2A; |
| | STAT5B; PIK3CB; PIK3C3; GNB2L1; BCL2L1; MAPK3; |
| | ETS1; KRAS; RUNX1; PIM1; PIK3C2A; RAF1; MAP2K2; |
| | AKT1; JAK2; PIK3R1; STAT3; MAP2K1; CCND1; AKT3; |
| | STAT1 |
| Amyotrophic Lateral | BID; IGF1; RAC1; BIRC4; PGF; CAPNS1; CAPN2; |
| Sclerosis Signaling | PIK3CA; BCL2; PIK3CB; PIK3C3; BCL2L1; CAPN1; |
| | PIK3C2A; TP53; CASP9; PIK3R1; RAB5A; CASP1; |
| | APAF1; VEGFA; BIRC2; BAX; AKT3; CASP3; BIRC3 |
| JAK/Stat Signaling | PTPN1; MAPK1; PTPN11; AKT2; PIK3CA; STAT5B; |
| | PIK3CB; PIK3C3; MAPK3; KRAS; SOCS1; STAT5A; |
| | PTPN6; PIK3C2A; RAF1; CDKN1A; MAP2K2; JAK1; |
| | AKT1; JAK2; PIK3R1; STAT3; MAP2K1; FRAP1; AKT3; |
| | STAT1 |
| Nicotinate and | PRKCE; IRAK1; PRKAA2; EIF2AK2; GRK6; MAPK1; |
| Nicotinamide | PLK1; AKT2; CDK8; MAPK8; MAPK3; PRKCD; PRKAA1; |
| Metabolism | PBEF1; MAPK9; CDK2; PIM1; DYRK1A; MAP2K2; |
| | MAP2K1; PAK3; NT5E; TTK; CSNK1A1; BRAF; SGK |
| Chemokine Signaling | CXCR4; ROCK2; MAPK1; PTK2; FOS; CFL1; GNAQ; |
| | CAMK2A; CXCL12; MAPK8; MAPK3; KRAS; MAPK13; |
| | RHOA; CCR3; SRC; PPP1CC; MAPK14; NOX1; RAF1; |
| | MAP2K2; MAP2K1; JUN; CCL2; PRKCA |
| IL-2 Signaling | ELK1; MAPK1; PTPN11; AKT2; PIK3CA; SYK; FOS; |
| | STAT5B; PIK3CB; PIK3C3; MAPK8; MAPK3; KRAS; |
| | SOCS1; STAT5A; PIK3C2A; LCK; RAF1; MAP2K2; |
| | JAK1; AKT1; PIK3R1; MAP2K1; JUN; AKT3 |
| Synaptic Long Term | PRKCE; IGF1; PRKCZ; PRDX6; LYN; MAPK1; GNAS; |
| Depression | PRKCI; GNAQ; PPP2R1A; IGF1R; PRKD1; MAPK3; |
| | KRAS; GRN; PRKCD; NOS3; NOS2A; PPP2CA; |
| | YWHAZ; RAF1; MAP2K2; PPP2R5C; MAP2K1; PRKCA |
| Estrogen Receptor | TAF4B; EP300; CARM1; PCAF; MAPK1; NCOR2; |
| Signaling | SMARCA4; MAPK3; NRIP1; KRAS; SRC; NR3C1; |
| | HDAC3; PPARGC1A; RBM9; NCOA3; RAF1; CREBBP; |
| | MAP2K2; NCOA2; MAP2K1; PRKDC; ESR1; ESR2 |
| Protein Ubiquitination | TRAF6; SMURF1; BIRC4; BRCA1; UCHL1; NEDD4; |
| Pathway | CBL; UBE2I; BTRC; HSPA5; USP7; USP10; FBXW7; |
| | USP9X; STUB1; USP22; B2M; BIRC2; PARK2; USP8; |
| | USP1; VHL; HSP90AA1; BIRC3 |
| IL-10 Signaling | TRAF6; CCR1; ELK1; IKBKB; SP1; FOS; NFKB2; |
| | MAP3K14; MAPK8; MAPK13; RELA; MAPK14; TNF; |
| | IKBKG; RELB; MAP3K7; JAK1; CHUK; STAT3; NFKB1; |
| | JUN; IL1R1; IL6 |
| VDR/RXR Activation | PRKCE; EP300; PRKCZ; RXRA; GADD45A; HES1; |
| | NCOR2; SP1; PRKCI; CDKN1B; PRKD1; PRKCD; |
| | RUNX2; KLF4; YY1; NCOA3; CDKN1A; NCOA2; SPP1; |
| | LRP5; CEBPB; FOXO1; PRKCA |
| TGF-beta Signaling | EP300; SMAD2; SMURF1; MAPK1; SMAD3; SMAD1; |
| | FOS; MAPK8; MAPK3; KRAS; MAPK9; RUNX2; |
| | SERPINE1; RAF1; MAP3K7; CREBBP; MAP2K2; |
| | MAP2K1; TGFBR1; SMAD4; JUN; SMAD5 |
| Toll-like Receptor | IRAK1; EIF2AK2; MYD88; TRAF6; PPARA; ELK1; |
| Signaling | IKBKB; FOS; NFKB2; MAP3K14; MAPK8; MAPK13; |
| | RELA; TLR4; MAPK14; IKBKG; RELB; MAP3K7; CHUK; |
| | NFKB1; TLR2; JUN |
| p38 MAPK Signaling | HSPB1; IRAK1; TRAF6; MAPKAPK2; ELK1; FADD; FAS; |
| | CREB1; DDIT3; RPS6KA4; DAXX; MAPK13; TRAF2; |
| | MAPK14; TNF; MAP3K7; TGFBR1; MYC; ATF4; IL1R1; |
| | SRF; STAT1 |
| Neurotrophin/TRK | NTRK2; MAPK1; PTPN11; PIK3CA; CREB1; FOS; |
| Signaling | PIK3CB; PIK3C3; MAPK8; MAPK3; KRAS; PIK3C2A; |
| | RAF1; MAP2K2; AKT1; PIK3R1; PDPK1; MAP2K1; |
| | CDC42; JUN; ATF4 |
| FXR/RXR Activation | INS; PPARA; FASN; RXRA; AKT2; SDC1; MAPK8; |
| | APOB; MAPK10; PPARG; MTTP; MAPK9; PPARGC1A; |
| | TNF; CREBBP; AKT1; SREBF1; FGFR4; AKT3; FOXO1 |
| Synaptic Long Term | PRKCE; RAP1A; EP300; PRKCZ; MAPK1; CREB1; |
| Potentiation | PRKCI; GNAQ; CAMK2A; PRKD1; MAPK3; KRAS; |
| | PRKCD; PPP1CC; RAF1; CREBBP; MAP2K2; MAP2K1; |
| | ATF4; PRKCA |
| Calcium Signaling | RAP1A; EP300; HDAC4; MAPK1; HDAC5; CREB1; |
| | CAMK2A; MYH9; MAPK3; HDAC2; HDAC7A; HDAC11; |
| | HDAC9; HDAC3; CREBBP; CALR; CAMKK2; ATF4; |
| | HDAC6 |
| EGF Signaling | ELK1; MAPK1; EGFR; PIK3CA; FOS; PIK3CB; PIK3C3; |
| | MAPK8; MAPK3; PIK3C2A; RAF1; JAK1; PIK3R1; |
| | STAT3; MAP2K1; JUN; PRKCA; SRF; STAT1 |
| Hypoxia Signaling in the | EDN1; PTEN; EP300; NQO1; UBE2I; CREB1; ARNT; |
| Cardiovascular System | HIF1A; SLC2A4; NOS3; TP53; LDHA; AKT1; ATM; |
| | VEGFA; JUN; ATF4; VHL; HSP90AA1 |
| LPS/IL-1 Mediated | IRAK1; MYD88; TRAF6; PPARA; RXRA; ABCA1; |
| Inhibition of RXR | MAPK8; ALDH1A1; GSTP1; MAPK9; ABCB1; TRAF2; |
| Function | TLR4; TNF; MAP3K7; NR1H2; SREBF1; JUN; IL1R1 |
| LXR/RXR Activation | FASN; RXRA; NCOR2; ABCA1; NFKB2; IRF3; RELA; |
| | NOS2A; TLR4; TNF; RELB; LDLR; NR1H2; NFKB1; |
| | SREBF1; ILIR1; CCL2; IL6; MMP9 |
| Amyloid Processing | PRKCE; CSNK1E; MAPK1; CAPNS1; AKT2; CAPN2; |
| | CAPN1; MAPK3; MAPK13; MAPT; MAPK14; AKT1; |
| | PSEN1; CSNK1A1; GSK3B; AKT3; APP |
| IL-4 Signaling | AKT2; PIK3CA; PIK3CB; PIK3C3; IRS1; KRAS; SOCS1; |
| | PTPN6; NR3C1; PIK3C2A; JAK1; AKT1; JAK2; PIK3R1; |
| | FRAP1; AKT3; RPS6KB1 |
| Cell Cycle: G2/M DNA | EP300; PCAF; BRCA1; GADD45A; PLK1; BTRC; |
| Damage Checkpoint | CHEK1; ATR; CHEK2; YWHAZ; TP53; CDKN1A; |
| Regulation | PRKDC; ATM; SFN; CDKN2A |
| Nitric Oxide Signaling | KDR; FLT1; PGF; AKT2; PIK3CA; PIK3CB; PIK3C3; |
| in the Cardiovascular | CAV1; PRKCD; NOS3; PIK3C2A; AKT1; PIK3R1; |
| System | VEGFA; AKT3; HSP90AA1 |
| Purine Metabolism | NME2; SMARCA4; MYH9; RRM2; ADAR; EIF2AK4; |
| | PKM2; ENTPD1; RAD51; RRM2B; TJP2; RAD51C; |
| | NT5E; POLD1; NME1 |
| cAMP-mediated | RAP1A; MAPK1; GNAS; CREB1; CAMK2A; MAPK3; |
| Signaling | SRC; RAF1; MAP2K2; STAT3; MAP2K1; BRAF; ATF4 |
| Mitochondrial | SOD2; MAPK8; CASP8; MAPK10; MAPK9; CASP9; |
| Dysfunction | PARK7; PSEN1; PARK2; APP; CASP3 |
| Notch Signaling | HES1; JAG1; NUMB; NOTCH4; ADAM17; NOTCH2; |
| | PSEN1; NOTCH3; NOTCH1; DLL4 |
| Endoplasmic Reticulum | HSPA5; MAPK8; XBP1; TRAF2; ATF6; CASP9; ATF4; |
| Stress Pathway | EIF2AK3; CASP3 |
| Pyrimidine Metabolism | NME2; AICDA; RRM2; EIF2AK4; ENTPD1; RRM2B; |
| | NT5E; POLD1; NME1 |
| Parkinson’s Signaling | UCHL1; MAPK8; MAPK13; MAPK14; CASP9; PARK7; |
| | PARK2; CASP3 |
| Cardiac & Beta | GNAS; GNAQ; PPP2R1A; GNB2L1; PPP2CA; PPP1CC; |
| Adrenergic Signaling | PPP2R5C |
| Glycolysis/ | HK2; GCK; GPI; ALDH1A1; PKM2; LDHA; HK1 |
| Gluconeogenesis | |
| Interferon Signaling | IRF1; SOCS1; JAK1; JAK2; IFITM1; STAT1; IFIT3 |
| Sonic Hedgehog | ARRB2; SMO; GLI2; DYRK1A; GLI1; GSK3B; DYRK1B |
| Signaling | |
| Glycerophospholipid | PLD1; GRN; GPAM; YWHAZ; SPHK1; SPHK2 |
| Metabolism | |
| Phospholipid | PRDX6; PLD1; GRN; YWHAZ; SPHK1; SPHK2 |
| Degradation | |
| Tryptophan Metabolism | SIAH2; PRMT5; NEDD4; ALDH1A1; CYP1B1; SIAH1 |
| Lysine Degradation | SUV39H1; EHMT2; NSD1; SETD7; PPP2R5C |
| Nucleotide Excision | ERCC5; ERCC4; XPA; XPC; ERCC1 |
| Repair Pathway | |
| Starch and Sucrose | UCHL1; HK2; GCK; GPI; HK1 |
| Metabolism | |
| Aminosugars Metabolism | NQO1; HK2; GCK; HK1 |
| Arachidonic Acid | PRDX6; GRN; YWHAZ; CYP1B1 |
| Metabolism | |
| Circadian Rhythm | CSNK1E; CREB1; ATF4; NR1D1 |
| Signaling | |
| Coagulation System | BDKRB1; F2R; SERPINE1; F3 |
| Dopamine Receptor | PPP2R1A; PPP2CA; PPP1CC; PPP2R5C |
| Signaling | |
| Glutathione Metabolism | IDH2; GSTP1; ANPEP; IDH1 |
| Glycerolipid Metabolism | ALDH1A1; GPAM; SPHK1; SPHK2 |
| Linoleic Acid | PRDX6; GRN; YWHAZ; CYP1B1 |
| Metabolism | |
| Methionine Metabolism | DNMT1; DNMT3B; AHCY; DNMT3A |
| Pyruvate Metabolism | GLO1; ALDH1A1; PKM2; LDHA |
| Arginine and Proline | ALDH1A1; NOS3; NOS2A |
| Metabolism | |
| Eicosanoid Signaling | PRDX6; GRN; YWHAZ |
| Fructose and Mannose | HK2; GCK; HK1 |
| Metabolism | |
| Galactose Metabolism | HK2; GCK; HK1 |
| Stilbene, Coumarine and | PRDX6; PRDX1; TYR |
| Lignin Biosynthesis | |
| Antigen Presentation | CALR; B2M |
| Pathway | |
| Biosynthesis of Steroids | NQO1; DHCR7 |
| Butanoate Metabolism | ALDH1A1; NLGN1 |
| Citrate Cycle | IDH2; IDH1 |
| Fatty Acid Metabolism | ALDH1A1; CYP1B1 |
| Glycerophospholipid | PRDX6; CHKA |
| Metabolism | |
| Histidine Metabolism | PRMT5; ALDH1A1 |
| Inositol Metabolism | ERO1L; APEX1 |
| Metabolism of | GSTP1; CYP1B1 |
| Xenobiotics | |
| by Cytochrome p450 | |
| Methane Metabolism | PRDX6; PRDX1 |
| Phenylalanine | PRDX6; PRDX1 |
| Metabolism | |
| Propanoate Metabolism | ALDH1A1; LDHA |
| Selenoamino Acid | PRMT5; AHCY |
| Metabolism | |
| Sphingolipid Metabolism | SPHK1; SPHK2 |
| Aminophosphonate | PRMT5 |
| Metabolism | |
| Androgen and Estrogen | PRMT5 |
| Metabolism | |
| Ascorbate and Aldarate | ALDH1A1 |
| Metabolism | |
| Bile Acid Biosynthesis | ALDH1A1 |
| Cysteine Metabolism | LDHA |
| Fatty Acid Biosynthesis | FASN |
| Glutamate Receptor | GNB2L1 |
| Signaling | |
| NRF2-mediated | PRDX1 |
| Oxidative | |
| Stress Response | |
| Pentose Phosphate | GPI |
| Pathway | |
| Pentose and Glucuronate | UCHL1 |
| Interconversions | |
| Retinol Metabolism | ALDH1A1 |
| Riboflavin Metabolism | TYR |
| Tyrosine Metabolism | PRMT5, TYR |
| Ubiquinone Biosynthesis | PRMT5 |
| Valine, Leucine and | ALDH1A1 |
| Isoleucine Degradation | |
| Glycine, Serine and | CHKA |
| Threonine Metabolism | |
| Lysine Degradation | ALDH1A1 |
| Pain/Taste | TRPM5; TRPA1 |
| Pain | TRPM7; TRPC5; TRPC6; TRPC1; Cnr1; cnr2; Grk2; |
| | Trpa1; Pomc; Cgrp; Crf; Pka; Era; Nr2b; TRPM5; Prkaca; |
| | Prkacb; Prkar1a; Prkar2a |
| Mitochondrial Function | AIF; CytC; SMAC (Diablo); Aifm-1; Aifm-2 |
| Developmental | BMP-4; Chordin (Chrd); Noggin (Nog); WNT (Wnt2; |
| Neurology | Wnt2b; Wnt3a; Wnt4; Wnt5a; Wnt6; Wnt7b; Wnt8b; |
| | Wnt9a; Wnt9b; Wnt10a; Wnt10b; Wnt16); beta-catenin; |
| | Dkk-1; Frizzled related proteins; Otx-2; Gbx2; FGF-8; |
| | Reelin; Dab1; unc-86 (Pou4f1 or Brn3a); Numb; Reln |

[0500] Thus, also described herein are methods of inducing one or more mutations in a eukaryotic or prokaryotic cell (in vitro, i.e. in an isolated eukaryotic cell) as herein discussed comprising delivering to cell a vector as described herein. The mutation(s) can include the introduction, deletion, or substitution of one or more nucleotides at a target sequence of cell(s). In some embodiments, the mutations can include the introduction, deletion, or substitution of 1-75 nucleotides at each target sequence of said cell(s). The mutations can include the introduction, deletion, or substitution of 1, 5, 10, 11, 12, 13, 14, 15, 16, 17, 18, 19, 20, 21, 22, 23, 24, 25, 26, 27, 28, 29, 30, 35, 40, 45, 50, or 75 nucleotides at each target sequence. The mutations can include the introduction, deletion, or substitution of 5, 10, 11, 12, 13, 14, 15, 16, 17, 18, 19, 20, 21, 22, 23, 24, 25, 26, 27, 28, 29, 30, 35, 40, 45, 50, or 75 nucleotides at each target sequence of said cell(s). The mutations include the introduction, deletion, or substitution of 10, 11, 12, 13, 14, 15, 16, 17, 18, 19, 20, 21, 22, 23, 24, 25, 26, 27, 28, 29, 30, 35, 40, 45, 50, or 75 nucleotides at each target sequence of said cell(s). The mutations can include the introduction, deletion, or substitution of 20, 21, 22, 23, 24, 25, 26, 27, 28, 29, 30, 35, 40, 45, 50, or 75 nucleotides at each target sequence of said cell(s). The mutations can include the introduction, deletion, or substitution of 40, 45, 50, 75, 100, 200, 300, 400 or 500 nucleotides at each target sequence of said cell(s). The mutations can include the introduction, deletion, or substitution of 500, 600, 700, 800, 900, 1000, 1100, 1200, 1300, 1400, 1500, 1600, 1700, 1800, 1900, 2000, 2100, 2200, 2300, 2400, 2500, 2600, 2700, 2800, 2900, 3000, 3100, 3200, 3300, 3400, 3500, 3600, 3700, 3800, 3900, 4000, 4100, 4200, 4300, 4400, 4500, 4600, 4700, 4800, 4900, 5000, 5100, 5200, 5300, 5400, 5500, 5600, 5700, 5800, 5900, 6000, 6100, 6200, 6300, 6400, 6500, 6600, 6700, 6800, 6900, 7000, 7100, 7200, 7300, 7400, 7500, 7600, 7700, 7800, 7900, 8000, 8100, 8200, 8300, 8400, 8500, 8600, 8700, 8800, 8900, 9000, 9100, 9200, 9300, 9400, 9500, 9600, 9700, 9800, or 9900 to 10000 nucleotides at each target sequence of said cell(s).

[0501] In some embodiments, the modifications can include the introduction, deletion, or substitution of nucleotides at each target sequence of said cell(s) via nucleic acid components (e.g. guide(s) RNA(s) or sgRNA(s)), such as those mediated by a CRISPR-Cas system.

[0502] In some embodiments, the modifications can include the introduction, deletion, or substitution of nucleotides at a target or random sequence of said cell(s) via a non CRISPR-Cas system or technique. Such techniques are discussed elsewhere herein, such as where engineered cells and methods of generating the engineered cells and organisms are discussed.

[0503] For minimization of toxicity and off-target effect when using a CRISPR-Cas system, it may be important to control the concentration of Cas mRNA and guide RNA delivered. Optimal concentrations of Cas mRNA and guide RNA can be determined by testing different concentrations in a cellular or non-human eukaryote animal model and using deep sequencing the analyze the extent of modification at potential off-target genomic loci. Alternatively, to minimize the level of toxicity and off-target effect, Cas nickase mRNA (for example S. pyogenes Cas9-like with the D10A mutation) can be delivered with a pair of guide RNAs targeting a site of interest. Guide sequences and strategies to minimize toxicity and off-target effects can be as in WO 2014/093622 (PCT/US2013/074667); or, via mutation as herein.

[0504] Typically, in the context of an endogenous CRISPR system, formation of a CRISPR complex (comprising a guide sequence hybridized to a target sequence and complexed with one or more Cas proteins) results in cleavage of one or both strands in or near (e.g. within 1, 2, 3, 4, 5, 6, 7, 8, 9, 10, 20, 50, or more base pairs from) the target sequence. Without wishing to be bound by theory, a tracr sequence, which may comprise or consist of all or a portion of a wild-type tracr sequence (e.g. about or more than about 20, 26, 32, 45, 48, 54, 63, 67, 85, or more nucleotides of a wild-type tracr sequence), may also form part of a CRISPR complex, such as by hybridization along at least a portion of the tracr sequence to all or a portion of a tracr mate sequence that is operably linked to a guide sequence.

[0505] In one embodiment, the invention provides a method of modifying a target polynucleotide in a eukaryotic cell. In some embodiments, the method includes delivering an engineered cell described herein and/or an engineered AAV capsid particle described herein having a CRISPR-Cas molecule as a cargo molecule to a subject and/or cell. The CRISPR-Cas system molecule(s) delivered can complex to bind to the target polynucleotide, e.g., to effect cleavage of said target polynucleotide, thereby modifying the target polynucleotide, wherein the CRISPR complex comprises a CRISPR enzyme complexed with a guide sequence hybridized to a target sequence within said target polynucleotide, wherein said guide sequence can be linked to a tracr mate sequence which in turn hybridizes to a tracr sequence. In some embodiments, said cleavage comprises cleaving one or two strands at the location of the target sequence by said CRISPR enzyme. In some embodiments, said cleavage results in decreased transcription of a target gene. In some embodiments, the method further comprises repairing said cleaved target polynucleotide by homologous recombination with an exogenous template polynucleotide, wherein said repair results in a mutation comprising an insertion, deletion, or substitution of one or more nucleotides of said target polynucleotide. In some embodiments, said mutation results in one or more amino acid changes in a protein expressed from a gene comprising the target sequence. In some embodiments, the method further comprises delivering one or more vectors to said eukaryotic cell, wherein one or more vectors comprise the CRISPR enzyme and one or more vectors drive expression of one or more of: the guide sequence linked to the tracr mate sequence, and the tracr sequence. In some embodiments, said CRISPR enzyme drive expression of one or more of: the guide sequence linked to the tracr mate sequence, and the tracr sequence. In some embodiments such CRISPR enzyme are delivered to the eukaryotic cell in a subject. In some embodiments, said modifying takes place in said eukaryotic cell in a cell culture. In some embodiments, the method further comprises isolating said eukaryotic cell from a subject prior to said modifying. In some embodiments, the method further comprises returning said eukaryotic cell and/or cells derived therefrom to said subject. In some embodiments, the isolated cells can be returned to the subject after delivery of one or more engineered AAV capsid particles to the isolated cell. In some embodiments, the isolated cells can be returned to the subject after delivering one or more molecules of the engineered delivery system described herein to the isolated cell, thus making the isolated cells engineered cells as previously described.

### Screening and Cell Selection

[0506] The engineered AAV capsid system vectors, engineered cells, and/or engineered AAV capsid particles described herein can be used in a screening assay and/or cell selection assay. The engineered delivery system vectors, engineered cells, and/or engineered AAV capsid particles can be delivered to a subject and/or cell. In some embodiments, the cell is a eukaryotic cell. The cell can be in vitro, ex vivo, in situ, or in vivo. The engineered AAV capsid system molecules, vectors, engineered cells, and/or engineered AAV capsid particles described herein can introduce an exogenous molecule or compound to subject or cell to which they are delivered. The presence of an exogenous molecule or compound can be detected which can allow for identification of a cell and/or attribute thereof. In some embodiments, the delivered molecules or particles can impart a gene or other nucleotide modification (e.g. mutations, gene or polynucleotide insertion and/or deletion, etc.). In some embodiments the nucleotide modification can be detected in a cell by sequencing. In some embodiments, the nucleotide modification can result in a physiological and/or biological modification to the cell that results in a detectable phenotypic change in the cell, which can allow for detection, identification, and/or selection of the cell. In some embodiments, the phenotypic change can be cell death, such as embodiments where binding of a CRISPR complex to a target polynucleotide results in cell death. Embodiments of the invention allow for selection of specific cells without requiring a selection marker or a two-step process that may include a counter-selection system. The cell(s) may be prokaryotic or eukaryotic cells.

[0507] In one embodiment, the invention provides for a method of selecting one or more cell(s) by introducing one or more mutations in a gene in the one or more cell(s), the method comprising: introducing one or more vectors, which can include one or more engineered delivery system molecules or vectors described elsewhere herein, into the cell(s), wherein the one or more vectors can include a CRISPR enzyme and/or drive expression of one or more of: a guide sequence linked to a tracr mate sequence, a tracr sequence, and an editing template; or other polynucleotide to be inserted into the cell and/or genome thereof; wherein, for example that which is being expressed is within and expressed in vivo by the CRISPR enzyme and/or the editing template, when included, comprises the one or more mutations that abolish CRISPR enzyme cleavage; allowing homologous recombination of the editing template with the target polynucleotide in the cell(s) to be selected; allowing a CRISPR complex to bind to a target polynucleotide to effect cleavage of the target polynucleotide within said gene, wherein the CRISPR complex comprises the CRISPR enzyme complexed with (1) the guide sequence that is hybridized to the target sequence within the target polynucleotide, and (2) the tracr mate sequence that is hybridized to the tracr sequence, wherein binding of the CRISPR complex to the target polynucleotide induces cell death, thereby allowing one or more cell(s) in which one or more mutations have been introduced to be selected. In a preferred embodiment, the CRISPR enzyme is a Cas protein. In another embodiment of the invention the cell to be selected may be a eukaryotic cell.

[0508] The screening methods involving the engineered AAV capsid system molecules, vectors, engineered cells, and/or engineered AAV capsid particles, including but not limited to those that deliver one more CRISPR-Cas system molecules to cell, can be used in detection methods such as fluorescence in situ hybridization (FISH). In some embodiments, one or more components of an engineered CRISPR-Cas system that includes a catalytically inactive Cas protein, can be delivered by an engineered AAV capsid system molecule, engineered cell, and/or engineered AAV capsid particle described elsewhere herein to a cell and used in a FISH method. The CRISPR-Cas system can include an inactivated Cas protein (dCas) (e.g. a dCas9), which lacks the ability to produce DNA double-strand breaks may be fused with a marker, such as fluorescent protein, such as the enhanced green fluorescent protein (eEGFP) and co-expressed with small guide RNAs to target pericentric, centric and telomeric repeats in vivo. The dCas system can be used to visualize both repetitive sequences and individual genes in the human genome. Such new applications of labelled dCas, dCas CRISPR-Cas systems, engineered AAV capsid system molecules, engineered cells, and/or engineered AAV capsid particles can be used in imaging cells and studying the functional nuclear architecture, especially in cases with a small nucleus volume or complex 3-D structures. (Chen B, Gilbert L A, Cimini B A, Schnitzbauer J, Zhang W, Li G W, Park J, Blackburn E H, Weissman J S, Qi L S, Huang B. 2013. Dynamic imaging of genomic loci in living human cells by an optimized CRISPR/Cas system. Cell 155(7):1479-91. doi:10.1016/j.cell.2013.12.001., the teachings of which can be applied and/or adapted to the CRISPR systems described herein. A similar approach involving a polynucleotide fused to a marker (e.g. a fluorescent marker) can be delivered to a cell via an engineered AAV capsid system molecule, vector, engineered cell, and/or engineered AAV capsid particle described herein and integrated into the genome of the cell and/or otherwise interact with a region of the genome of a cell for FISH analysis.

[0509] Similar approaches for studying other cell organelles and other cell structures can be accomplished by delivering to the cell (e.g. via an engineered delivery AAV capsid molecule, engineered cell, and/or engineered AAV capsid particle described herein) one or more molecules fused to a marker (such as a fluorescent marker), wherein the molecules fused to the marker are capable of targeting one or more cell structures. By analyzing the presence of the markers, one can identify and/or image specific cell structures.

[0510] In some embodiments, the engineered AAV capsid system molecules and/or engineered AAV capsid particles can be used in a screening assay inside or outside of a cell. In some embodiments, the screening assay can include delivering a CRISPR-Cas cargo molecule(s) via an engineered AAV capsid particle.

[0511] Use of the present system in screening is also provided by the present invention, e.g., gain of function screens. Cells which are artificially forced to overexpress a gene are be able to down regulate the gene over time (re-establishing equilibrium) e.g. by negative feedback loops. By the time the screen starts the unregulated gene might be reduced again. Other screening assays are discussed elsewhere herein.

[0512] In an embodiment, the invention provides a cell from or of an in vitro method of delivery, wherein the method comprises contacting the delivery system with a cell, optionally a eukaryotic cell, whereby there is delivery into the cell of constituents of the delivery system, and optionally obtaining data or results from the contacting, and transmitting the data or results.

[0513] In an embodiment, the invention provides a cell from or of an in vitro method of delivery, wherein the method comprises contacting the delivery system with a cell, optionally a eukaryotic cell, whereby there is delivery into the cell of constituents of the delivery system, and optionally obtaining data or results from the contacting, and transmitting the data or results; and wherein the cell product is altered compared to the cell not contacted with the delivery system, for example altered from that which would have been wild type of the cell but for the contacting. In an embodiment, the cell product is non-human or animal. In some embodiments, the cell product is human.

[0514] In some embodiments, a host cell is transiently or non-transiently transfected with one or more vectors described herein. In some embodiments, a cell is transfected as it naturally occurs in a subject optionally to be reintroduced therein. In some embodiments, a cell that is transfected is taken from a subject. In some embodiments, the cell obtained from or is derived from cells taken from a subject, such as a cell line. Delivery mechanisms and techniques of the engineered AAV capsid system, engineered AAV capsid particles are described elsewhere herein.

[0515] In some embodiments, it is envisaged to introduce the engineered AAV capsid system molecule(s) and/or engineered AAV capsid particle(s) directly to the host cell. For instance, the engineered AAV capsid system molecule(s) can be delivered together with one or more cargo molecules to be packaged into an engineered AAV capsid particle.

[0516] In some embodiments, the invention provides a method of expressing an engineered delivery molecule and cargo molecule to be packaged in an engineered GTA particle in a cell that can include the step of introducing the vector according any of the vector delivery systems disclosed herein.

[0517] The invention is further described in the following examples, which do not limit the scope of the invention described in the claims.

### EXAMPLES

### Example 1—mRNA Based Detection Methods are More Stringent for Selection of AAV Variants

[0518] FIG. 1 demonstrates the adeno-associated virus (AAV) transduction mechanism, which results in production of mRNA. As is demonstrated in FIG. 1, functional transduction of a cell by an AAV particle can result in the production of an mRNA strand. Non-functional transduction would not produce such a product despite the viral genome being detectable using a DNA-based assay. Thus, mRNA-based detection assays to detect transduction by e.g. an AAV can be more stringent and provide feedback as to the functionality of a virus particle that is able to functionally transduce a cell. FIG. 2 shows a graph that can demonstrate that mRNA-based selection of AAV variants can be more stringent than DNA-based selection. The virus library was expressed under the control of a CMV promoter.

### Example 2—mRNA Based Detection Methods can be Used to Detect AAV Capsid Variants from a Capsid Variant Library

[0519] FIGS. 3A-3B show graphs that demonstrate a correlation between the virus library and vector genome DNA (FIG. 3A) and mRNA (FIG. 3B) in the liver. FIGS. 4A-4F show graphs that can demonstrate capsid variants expressed at the mRNA level identified in different tissues.

### Example 3—Capsid mRNA Expression can be Driven by Tissue Specific Promoters

[0520] FIGS. 5A-5C show graphs that demonstrate capsid mRNA expression in different tissues under the control of cell-type specific promoters (as noted on x-axis). CMV was included as an exemplary constitutive promoter. CK8 is a muscle-specific promoter. MHCK7 is a muscle-specific promoter. hSyn is a neuron specific promoter.

### Example 4—Capsid Variant Library Generation, Variant Screening, and Variant Dentification

[0521] Generally, an AAV capsid library can be generated by expressing engineered capsid vectors each containing an engineered AAV capsid polynucleotide previously described in an appropriate AAV producer cell line. See e.g. FIG. 8. This can generate an AAV capsid library that can contain one more desired cell-specific engineered AAV capsid variant. FIG. 7 shows a schematic demonstrating embodiments of generating an AAV capsid variant library, particularly insertion of a random n-mer (n=3-15 amino acids) into a wild-type AAV, e.g. AAV9. In this example, random 7-mers were inserted between aa588-589 of variable region VIII of AAV9 viral protein and used to form the viral genome containing vectors with one variant per vector. As shown in FIG. 8, the capsid variant vector library was used to generate AAV particles where each capsid variant encapsulated its coding sequence as the vector genome. FIG. 9 shows vector maps of representative AAV capsid plasmid library vectors (see e.g. FIG. 8) that can be used in an AAV vector system to generate an AAV capsid variant library. The library can be generated with the capsid variant polynucleotide under the control of a tissue specific promoter or constitutive promoter. The library was also made with capsid variant polynucleotide that included a polyadenylation signal.

[0522] As shown in FIG. 6 the AAV capsid library can be administered to various non-human animals for a first round of mRNA-based selection. As shown in FIG. 1, the transduction process by AAVs and related vectors result in the production of an mRNA molecule that is reflective of the genome of the virus that transduced the cell. As is at least demonstrated in the Examples herein, mRNA based-selection can be more specific and effective to determine a virus particle capable of functionally transducing a cell because it is based on the functional product produced as opposed to just detecting the presence of a virus particle in the cell by measuring the presence of viral DNA.

[0523] After first-round administration, one or more engineered AAV virus particles having a desired capsid variant can then be used to form a filtered AAV capsid library. Desirable AAV virus particles can be identified by measuring the mRNA expression of the capsid variants and determining which variants are highly expressed in the desired cell type(s) as compared to non-desired cells type(s). Those that are highly expressed in the desired cell, tissue, and/or organ type are the desired AAV capsid variant particles. In some embodiments, the AAV capsid variant encoding polynucleotide is under control of a tissue-specific promoter that has selective activity in the desired cell, tissue, or organ.

[0524] The engineered AAV capsid variant particles identified from the first round can then be administered to various non-human animals. In some embodiments, the animals used in the second round of selection and identification are not the same as those animals used for first round selection and identification. Similar to round 1, after administration the top expressing variants in the desired cell, tissue, and/or organ type(s) can be identified by measuring viral mRNA expression in the cells. The top variants identified after round two can then be optionally barcoded and optionally pooled. In some embodiments, top variants from the second round can then be administered to a non-human primate to identify the top cell-specific variant(s), particularly if the end use for the top variant is in humans. Administration at each round can be systemic.

[0525] FIG. 10 shows a graph that demonstrates the viral titer (calculated as AAV9 vector genome/15 cm dish) produced by libraries generated using different promoters. As demonstrated in FIG. 10, virus titer was not affected significantly be the use of different promoters.

[0526] FIGS. 11A-11C show graphs (FIGS. 11A and 11C) and schematic (FIG. 11B) that demonstrate the correlation between the amount of plasmid library vector used for virus library production and cross-packaging. FIG. 11A can demonstrate the effect of the plasmid library vector amount on virus titer. FIG. 11B can demonstrate the nucleotide sequence of the random n-mer (FIG. 11C shows by way of example a 7-mer) as inserted between the codon for aa588 and aa589 of wild-type AAV9. Each X indicates an amino acid. N indicates any nucleotide (G, A, T, C). K indicates that the nucleotide at that position is T or G. FIG. 11C can demonstrate the effect of the plasmid library vector amount on % reads containing a STOP codon. Increasing the amount of plasmid library vector used to produce the virus particle library increased the titer as measured by the amount of library vector genome/15 cm dish of cells transduced (FIG. 11A). Additionally, the percentage of reads that included a stop codon introduced by the random n-mer motif increased when the amount of plasmid library vector used to produce the virus particle library was increased.

[0527] FIGS. 12A-12F show graphs that demonstrate the results obtained after the first round of selection in C57BL/6 mice using a capsid library expressed under the control of the MHCK7 muscle-specific promoter.

[0528] FIGS. 13A-13D show graphs that demonstrate the results obtained after the second round of selection in C57BL/6 mice.

[0529] FIGS. 14A-14B shows graphs that can demonstrate a correlation between the abundance of variants encoded by synonymous codons. This graph demonstrates that there is little to no codon bias in both the virus library and the functional virus particles.

[0530] FIG. 15 shows a graph that can demonstrate a correlation between the abundance of the same variants expressed under the control of two different muscle specific promoters (MHCK7 and CK8). This graph can demonstrate that there is little effect of which tissue-specific promoter is used to generate the capsid variant library, at least for muscle cells.

### Example 5—Muscle-Tropic rAAV Capsids

[0531] FIG. 16 shows a graph that can demonstrate muscle-tropic capsid variants that produce rAAV with similar titers to wild-type AAV9 capsid.

[0532] FIG. 17 shows images that can demonstrate a comparison of mouse tissue transduction between rAAV9-GFP and rMyoAAV-GFP.

[0533] FIG. 18 shows a panel of images that can demonstrate a comparison of mouse tissue transduction between rAAV9-GFP and rMyoAAV-G.

[0534] FIG. 19 shows a panel of images that can demonstrate a comparison of mouse tissue transduction between rAAV9-GFP and rMyoAAV-GF.

[0535] FIG. 20 shows a schematic of selection of potent capsid variants for muscle-directed gene delivery across species.

[0536] FIGS. 21A-21C show tables that demonstrate selection in different strains of mice and identify the same variants as the top muscle-tropic hits.

[0537] Various modifications and variations of the described methods, pharmaceutical compositions, and kits of the invention will be apparent to those skilled in the art without departing from the scope and spirit of the invention. Although the invention has been described in connection with specific embodiments, it will be understood that it is capable of further modifications and that the invention as claimed should not be unduly limited to such specific embodiments. Indeed, various modifications of the described modes for carrying out the invention that are obvious to those skilled in the art are intended to be within the scope of the invention. This application is intended to cover any variations, uses, or adaptations of the invention following, in general, the principles of the invention and including such departures from the present disclosure come within known customary practice within the art to which the invention pertains and may be applied to the essential features herein before set forth.

What is claimed is:

1. An adeno-associated virus (AAV) comprising a capsid protein and a polynucleotide encoding a cargo (cargo polynucleotide), wherein the capsid protein comprises a muscle targeting moiety, which comprises an n-mer motif comprising RGDXn, wherein X is any amino acid and n is 4-15, wherein the n-mer motif is located in variable region VIII (VR-VIII), and wherein the cargo polynucleotide is operably linked to a MHCK7 promoter or a CK8 promoter.

2. The AAV of claim 1, wherein n is 4.

3. The AAV of claim 1, wherein n is 5.

4. The AAV of claim 1, wherein the n-mer motif is located in VR-VIII corresponding to the wild-type AAV9 capsid protein.

5. The AAV of claim 4, wherein the n-mer motif is located between amino acids 588 and 589 corresponding to the wild-type AAV9 capsid protein or an equivalent position in a wild-type AAV capsid protein of a different serotype

6. The AAV of claim 1, wherein the capsid protein comprises an AAV9 capsid protein.

7. The AAV of claim 1, wherein the capsid protein comprises an AAVRh74 capsid protein.

8. The AAV of claim 1, wherein the cargo polynucleotide is operably linked to the CK8 promoter.

9. The AAV of claim 1, wherein the cargo polynucleotide is operably linked to the MHCK7 promoter.

10. The AAV of claim 1, wherein the capsid protein comprises an AAV9 capsid protein with one, two, or three amino acid substitution, insertion or deletion.

11. The AAV of claim 1, wherein the capsid protein comprises an AAVRh74 capsid protein with one, two, or three amino acid substitution, insertion, or deletion.

12. The AAV of claim 1, wherein the cargo comprises a protein for treating a muscular dystrophy.

13. A method of targeting a muscle cell in a subject in need thereof having a muscular dystrophy comprising administering the AAV of claim 1 to the subject, wherein the cargo is expressed in the muscle cell.

14. A method of targeting a muscle cell in a subject in need thereof having a muscular dystrophy comprising administering the AAV of claim 2 to the subject, wherein the cargo is expressed in the muscle cell.

15. A method of targeting a muscle cell in a subject in need thereof having a muscular dystrophy comprising administering the AAV of claim 8 to the subject, wherein the cargo is expressed in the muscle cell.

16. A method of targeting a muscle cell in a subject in need thereof having a muscular dystrophy comprising administering the AAV of claim 9 to the subject, wherein the cargo is expressed in the muscle cell.

17. The method of claim 13, wherein the AAV is capable of transducing the muscle cell more effectively than an AAV without the n-mer motif.

18. The method of claim 13, wherein the AAV is capable of inducing faster kinetics of in vivo gene expression in the muscle cell compared to an AAV without the n-mer motif.

The application's sequence listing, which the Patent Office published only in electronic form, follows.

SEQUENCE LISTING (8314 sequences)

SEQ ID NO: 1 - protein, 736 aa, synthetic construct
  REGION 1..736: note = AAV-9 reference seqeunce
MAADGYLPDWLEDNLSEGIREWWALKPGAPQPKANQQHQDNARGLVLPGYKYLGPGNGLDKGEPVNAADAAALEHDKAYDQQLKAGDNPYLKYNHADAEFQERLKEDTSFGGNLGRAVFQAKKRLLEPLGLVEEAAKTAPGKKRPVEQSPQEPDSSAGIGKSGAQPAKKRLNFGQTGDTESVPDPQPIGEPPAAPSGVGSLTMASGGGAPVADNNEGADGVGSSSGNWHCDSQWLGDRVITTSTRTWALPTYNNHLYKQISNSTSGGSSNDNAYFGYSTPWGYFDFNRFHCHFSPRDWQRLINNNWGFRPKRLNFKLFNIQVKEVTDNNGVKTIANNLTSTVQVFTDSDYQLPYVLGSAHEGCLPPFPADVFMIPQYGYLTLNDGSQAVGRSSFYCLEYFPSQMLRTGNNFQFSYEFENVPFHSSYAHSQSLDRLMNPLIDQYLYYLSKTINGSGQNQQTLKFSVAGPSNMAVQGRNYIPGPSYRQQRVSTTVTQNNNSEFAWPGASSWALNGRNSLMNPGPAMASHKEGEDRFFPLSGSLIFGKQGTGRDNVDADKVMITNEEEIKTTNPVATESYGQVATNHQSAQAQAQTGWVQNQGILPGMVWQDRDVYLQGPIWAKIPHTDGNFHPSPLMGGFGMKHPPPQILIKNTPVPADPPTAFNKDKLNSFITQYSTGQVSVEIEWELQKENSKRWNPEIQYTSNYYKSNNVEFAVNTEGVYSEPRPIGTRYLTRNL

SEQ ID NO: 2-12 - skipped (11 entries)

SEQ ID NO: 13 - protein, 7 aa, synthetic construct
  REGION 1..7: note = n-mer motif
RGDLSTP

SEQ ID NO: 14 - protein, 7 aa, synthetic construct
  REGION 1..7: note = n-mer motif
RGDLNQY

SEQ ID NO: 15 - protein, 7 aa, synthetic construct
  REGION 1..7: note = n-mer motif
RGDLTTP

SEQ ID NO: 16 - protein, 7 aa, synthetic construct
  REGION 1..7: note = n-mer motif
RGDATEL

SEQ ID NO: 17 - protein, 7 aa, synthetic construct
  REGION 1..7: note = n-mer motif
RGDQLYH

SEQ ID NO: 18 - protein, 7 aa, synthetic construct
  REGION 1..7: note = n-mer motif
RGDLSTP

SEQ ID NO: 19 - protein, 7 aa, synthetic construct
  REGION 1..7: note = n-mer motif
RGDVAAK

SEQ ID NO: 20 - protein, 7 aa, synthetic construct
  REGION 1..7: note = n-mer motif
RGDLTTP

SEQ ID NO: 21 - protein, 7 aa, synthetic construct
  REGION 1..7: note = n-mer motif
RGDLNQY

SEQ ID NO: 22 - protein, 7 aa, synthetic construct
  REGION 1..7: note = n-mer motif
RGDTMSK

SEQ ID NO: 23 - protein, 7 aa, synthetic construct
  REGION 1..7: note = n-mer motif
RGDVAAK

SEQ ID NO: 24 - protein, 7 aa, synthetic construct
  REGION 1..7: note = n-mer motif
RGDTMSK

SEQ ID NO: 25 - protein, 7 aa, synthetic construct
  REGION 1..7: note = n-mer motif
RGDATEL

SEQ ID NO: 26 - protein, 7 aa, synthetic construct
  REGION 1..7: note = n-mer motif
RGDLTTP

SEQ ID NO: 27 - protein, 7 aa, synthetic construct
  REGION 1..7: note = n-mer motif
RGDLNQY

SEQ ID NO: 28 - protein, 7 aa, synthetic construct
  REGION 1..7: note = n-mer motif
RGDLSTP

SEQ ID NO: 29 - protein, 7 aa, synthetic construct
  REGION 1..7: note = n-mer motif
RGDQLYH

SEQ ID NO: 30 - protein, 7 aa, synthetic construct
  REGION 1..7: note = n-mer motif
RGDTMSK

SEQ ID NO: 31 - protein, 7 aa, synthetic construct
  REGION 1..7: note = n-mer motif
RGDATEL

SEQ ID NO: 32 - protein, 7 aa, synthetic construct
  REGION 1..7: note = n-mer motif
RGDLSTP

SEQ ID NO: 33 - protein, 7 aa, synthetic construct
  REGION 1..7: note = n-mer motif
RGDMINT

SEQ ID NO: 34 - protein, 7 aa, synthetic construct
  REGION 1..7: note = n-mer motif
RGDLNQY

SEQ ID NO: 35 - protein, 7 aa, synthetic construct
  REGION 1..7: note = n-mer motif
RGDTMSK

SEQ ID NO: 36 - protein, 7 aa, synthetic construct
  REGION 1..7: note = n-mer motif
RGDLTTP

SEQ ID NO: 37 - protein, 7 aa, synthetic construct
  REGION 1..7: note = n-mer motif
RGDLNDS

SEQ ID NO: 38 - protein, 7 aa, synthetic construct
  REGION 1..7: note = n-mer motif
RGDLSTP

SEQ ID NO: 39 - protein, 7 aa, synthetic construct
  REGION 1..7: note = n-mer motif
RGDLSTP

SEQ ID NO: 40 - protein, 7 aa, synthetic construct
  REGION 1..7: note = n-mer motif
RGDLTTP

SEQ ID NO: 41 - protein, 7 aa, synthetic construct
  REGION 1..7: note = n-mer motif
RGDLNQY

SEQ ID NO: 42 - protein, 7 aa, synthetic construct
  REGION 1..7: note = n-mer motif
RGDQLYH

SEQ ID NO: 43 - protein, 7 aa, synthetic construct
  REGION 1..7: note = n-mer motif
RGDATEL

SEQ ID NO: 44 - protein, 7 aa, synthetic construct
  REGION 1..7: note = n-mer motif
RGDTMSK

SEQ ID NO: 45 - protein, 7 aa, synthetic construct
  REGION 1..7: note = n-mer motif
RGDLNQY

SEQ ID NO: 46 - protein, 7 aa, synthetic construct
  REGION 1..7: note = n-mer motif
RGDLTTP

SEQ ID NO: 47 - protein, 7 aa, synthetic construct
  REGION 1..7: note = n-mer motif
RGDMINT

SEQ ID NO: 48 - protein, 7 aa, synthetic construct
  REGION 1..7: note = n-mer motif
RGDTMSK

SEQ ID NO: 49 - protein, 7 aa, synthetic construct
  REGION 1..7: note = n-mer motif
RGDTMNY

SEQ ID NO: 50 - protein, 7 aa, synthetic construct
  REGION 1..7: note = n-mer motif
RGDATEL

SEQ ID NO: 51 - DNA, 12 bp, synthetic construct
  source 1..12: mol_type = other DNA
  misc_feature 1..12: note = stemloop 2
acttgtttaagt

SEQ ID NO: 52 - skipped

SEQ ID NO: 53 - DNA, 16 bp, synthetic construct
  source 1..16: mol_type = other DNA
  misc_feature 1..16: note = stemloop3
ggcaccgagtcggtgc

SEQ ID NO: 54 - skipped

SEQ ID NO: 55 - DNA, 30 bp, synthetic construct
  misc_feature 9..12: note = MISC_FEATURE - n represents any set of nucleotides that are complementary to and together will base pair to nucleotides 17-20, where n is a, c, g, t or u
  misc_feature 1..30: note = DR:tracrRNA duplex
  misc_feature 21..23: note = MISC_FEATURE - part of the bulge in the duplex
  misc_feature 13..16: note = MISC_FEATURE - n represents a linker of any length and any base composition so long as it does not alter the overall structure of the duplex
  misc_feature 8: note = MISC_FEATURE - n represents part of the bulge of the duplex, where n is a, c, g, t or u
  misc_feature 17..20: note = MISC_FEATURE - n represents any set of nucleotides that are complementary to and together will base pair to nucleotides 9-12, where n is a, c, g, t or u
  source 1..30: mol_type = other DNA
gyyyyagnnnnnnnnnnnnnaanttrrrrt

SEQ ID NO: 56 - protein, 15 aa, synthetic construct
  REGION 1..15: note = linker
GGGGSGGGGSGGGGS

SEQ ID NO: 57 - protein, 30 aa, synthetic construct
  REGION 1..30: note = linker
GGGGSGGGGSGGGGSGGGGSGGGGSGGGGS

SEQ ID NO: 58 - protein, 45 aa, synthetic construct
  REGION 1..45: note = linker
GGGGSGGGGSGGGGSGGGGSGGGGSGGGGSGGGGSGGGGSGGGGS

SEQ ID NO: 59 - protein, 60 aa, synthetic construct
  REGION 1..60: note = linker
GGGGSGGGGSGGGGSGGGGSGGGGSGGGGSGGGGSGGGGSGGGGSGGGGSGGGGSGGGGS

SEQ ID NO: 60 - DNA, 21 bp, synthetic construct
  source 1..21: mol_type = other DNA
  misc_feature 1..21: note = n-mer motif encoding polynucleotide
aggggtgatctttctacgcct

SEQ ID NO: 61 - DNA, 21 bp, synthetic construct
  source 1..21: mol_type = other DNA
  misc_feature 1..21: note = n-mer motif encoding polynucleotide
aggggcgacctgaaccaatac

SEQ ID NO: 62 - DNA, 21 bp, synthetic construct
  source 1..21: mol_type = other DNA
  misc_feature 1..21: note = n-mer motif encoding polynucleotide
cggggtgatcttactacgcct

SEQ ID NO: 63 - DNA, 21 bp, synthetic construct
  source 1..21: mol_type = other DNA
  misc_feature 1..21: note = n-mer motif encoding polynucleotide
aggggggatgcgacggagctt

SEQ ID NO: 64 - DNA, 21 bp, synthetic construct
  source 1..21: mol_type = other DNA
  misc_feature 1..21: note = n-mer motif encoding polynucleotide
cggggtgatcagctttatcat

SEQ ID NO: 65 - DNA, 21 bp, synthetic construct
  source 1..21: mol_type = other DNA
  misc_feature 1..21: note = n-mer motif encoding polynucleotide
agaggcgacttatccacaccc

SEQ ID NO: 66 - DNA, 21 bp, synthetic construct
  misc_feature 1..21: note = n-mer motif encoding polynucleotide
  source 1..21: mol_type = other DNA
cgtggtgatgtggcggctaag

SEQ ID NO: 67 - DNA, 21 bp, synthetic construct
  misc_feature 1..21: note = n-mer motif encoding polynucleotide
  source 1..21: mol_type = other DNA
agaggagacttgacaacccca

SEQ ID NO: 68 - DNA, 21 bp, synthetic construct
  source 1..21: mol_type = other DNA
  misc_feature 1..21: note = n-mer motif encoding polynucleotide
cggggtgatcttaatcagtat

SEQ ID NO: 69 - DNA, 21 bp, synthetic construct
  misc_feature 1..21: note = n-mer motif encoding polynucleotide
  source 1..21: mol_type = other DNA
cgaggagacaccatgagcaaa

SEQ ID NO: 70 - DNA, 21 bp, synthetic construct
  source 1..21: mol_type = other DNA
  misc_feature 1..21: note = n-mer motif encoding polynucleotide
cgcggagacgtagccgccaaa

SEQ ID NO: 71 - DNA, 21 bp, synthetic construct
  source 1..21: mol_type = other DNA
  misc_feature 1..21: note = n-mer motif encoding polynucleotide
cggggggatactatgtctaag

SEQ ID NO: 72 - DNA, 21 bp, synthetic construct
  source 1..21: mol_type = other DNA
  misc_feature 1..21: note = n-mer motif encoding polynucleotide
cggggtgacgcaacagaattg

SEQ ID NO: 73 - DNA, 21 bp, synthetic construct
  misc_feature 1..21: note = n-mer motif encoding polynucleotide
  source 1..21: mol_type = other DNA
gcacggtcaaacgactcggtc

SEQ ID NO: 74 - DNA, 21 bp, synthetic construct
  source 1..21: mol_type = other DNA
  misc_feature 1..21: note = n-mer motif encoding polynucleotide
cggggtgacatgaacaactca

SEQ ID NO: 75 - DNA, 21 bp, synthetic construct
  misc_feature 1..21: note = n-mer motif encoding polynucleotide
  source 1..21: mol_type = other DNA
acgatgggtgctaatggtact

SEQ ID NO: 76 - DNA, 21 bp, synthetic construct
  source 1..21: mol_type = other DNA
  misc_feature 1..21: note = n-mer motif encoding polynucleotide
cctaatgttacgcagtcttat

SEQ ID NO: 77 - DNA, 21 bp, synthetic construct
  source 1..21: mol_type = other DNA
  misc_feature 1..21: note = n-mer motif encoding polynucleotide
cgtttggacctgcaagtccac

SEQ ID NO: 78 - DNA, 21 bp, synthetic construct
  source 1..21: mol_type = other DNA
  misc_feature 1..21: note = n-mer motif encoding polynucleotide
gggctttctaaggcgtctgat

SEQ ID NO: 79 - DNA, 21 bp, synthetic construct
  misc_feature 1..21: note = n-mer motif encoding polynucleotide
  source 1..21: mol_type = other DNA
gatcctggtcggacgggtacg

SEQ ID NO: 80 - DNA, 21 bp, synthetic construct
  misc_feature 1..21: note = n-mer motif encoding polynucleotide
  source 1..21: mol_type = other DNA
tatcggggtagggaggattgg

SEQ ID NO: 81 - DNA, 21 bp, synthetic construct
  misc_feature 1..21: note = n-mer motif encoding polynucleotide
  source 1..21: mol_type = other DNA
agatacggagaatccatcgaa

SEQ ID NO: 82 - DNA, 21 bp, synthetic construct
  source 1..21: mol_type = other DNA
  misc_feature 1..21: note = n-mer motif encoding polynucleotide
agtctgaacaacatgggatcg

SEQ ID NO: 83 - DNA, 21 bp, synthetic construct
  source 1..21: mol_type = other DNA
  misc_feature 1..21: note = n-mer motif encoding polynucleotide
aatagtgatcagcggaattgg

SEQ ID NO: 84 - DNA, 21 bp, synthetic construct
  source 1..21: mol_type = other DNA
  misc_feature 1..21: note = n-mer motif encoding polynucleotide
cgtggtgatatgtctcgtgag

SEQ ID NO: 85 - DNA, 21 bp, synthetic construct
  misc_feature 1..21: note = n-mer motif encoding polynucleotide
  source 1..21: mol_type = other DNA
atgactgatgcgaataggatt

SEQ ID NO: 86 - DNA, 21 bp, synthetic construct
  source 1..21: mol_type = other DNA
  misc_feature 1..21: note = n-mer motif encoding polynucleotide
gtctacaacggcaacgtagta

SEQ ID NO: 87 - DNA, 21 bp, synthetic construct
  misc_feature 1..21: note = n-mer motif encoding polynucleotide
  source 1..21: mol_type = other DNA
cgtggggatatgattaatacg

SEQ ID NO: 88 - DNA, 21 bp, synthetic construct
  misc_feature 1..21: note = n-mer motif encoding polynucleotide
  source 1..21: mol_type = other DNA
agtggtctttcgcatggtcag

SEQ ID NO: 89 - DNA, 21 bp, synthetic construct
  source 1..21: mol_type = other DNA
  misc_feature 1..21: note = n-mer motif encoding polynucleotide
actggccaattagtaggaacc

SEQ ID NO: 90 - DNA, 21 bp, synthetic construct
  misc_feature 1..21: note = n-mer motif encoding polynucleotide
  source 1..21: mol_type = other DNA
gctaattctattgggggtccg

SEQ ID NO: 91 - DNA, 21 bp, synthetic construct
  source 1..21: mol_type = other DNA
  misc_feature 1..21: note = n-mer motif encoding polynucleotide
tacagtcaatcgctgtctgaa

SEQ ID NO: 92 - DNA, 21 bp, synthetic construct
  source 1..21: mol_type = other DNA
  misc_feature 1..21: note = n-mer motif encoding polynucleotide
tatcataagtatagtacggat

SEQ ID NO: 93 - DNA, 21 bp, synthetic construct
  misc_feature 1..21: note = n-mer motif encoding polynucleotide
  source 1..21: mol_type = other DNA
gctcgtcatgatgagcatgtg

SEQ ID NO: 94 - DNA, 21 bp, synthetic construct
  source 1..21: mol_type = other DNA
  misc_feature 1..21: note = n-mer motif encoding polynucleotide
gccatagactctatcaaacaa

SEQ ID NO: 95 - DNA, 21 bp, synthetic construct
  source 1..21: mol_type = other DNA
  misc_feature 1..21: note = n-mer motif encoding polynucleotide
cgtttggacctgcaagtcaac

SEQ ID NO: 96 - DNA, 21 bp, synthetic construct
  source 1..21: mol_type = other DNA
  misc_feature 1..21: note = n-mer motif encoding polynucleotide
cgcggcgacatgataaacacc

SEQ ID NO: 97 - DNA, 21 bp, synthetic construct
  source 1..21: mol_type = other DNA
  misc_feature 1..21: note = n-mer motif encoding polynucleotide
agtgtgttgtctcaggctaat

SEQ ID NO: 98 - DNA, 21 bp, synthetic construct
  source 1..21: mol_type = other DNA
  misc_feature 1..21: note = n-mer motif encoding polynucleotide
tttacggtgaatcaggatctt

SEQ ID NO: 99 - DNA, 21 bp, synthetic construct
  misc_feature 1..21: note = n-mer motif encoding polynucleotide
  source 1..21: mol_type = other DNA
acggataatggtcttcttgtg

SEQ ID NO: 100 - DNA, 21 bp, synthetic construct
  misc_feature 1..21: note = n-mer motif encoding polynucleotide
  source 1..21: mol_type = other DNA
tatcagcagacttctagtacg

SEQ ID NO: 101 - DNA, 21 bp, synthetic construct
  source 1..21: mol_type = other DNA
  misc_feature 1..21: note = n-mer motif encoding polynucleotide
acagaacaatcttactcacga

SEQ ID NO: 102 - DNA, 21 bp, synthetic construct
  source 1..21: mol_type = other DNA
  misc_feature 1..21: note = n-mer motif encoding polynucleotide
attatggggcttagtcaggct

SEQ ID NO: 103 - DNA, 21 bp, synthetic construct
  source 1..21: mol_type = other DNA
  misc_feature 1..21: note = n-mer motif encoding polynucleotide
gctactgcgcatcaggatggt

SEQ ID NO: 104 - DNA, 21 bp, synthetic construct
  misc_feature 1..21: note = n-mer motif encoding polynucleotide
  source 1..21: mol_type = other DNA
tataatgctactccttcgcag

SEQ ID NO: 105 - DNA, 21 bp, synthetic construct
  source 1..21: mol_type = other DNA
  misc_feature 1..21: note = n-mer motif encoding polynucleotide
tatacgcagggtattatgaat

SEQ ID NO: 106 - DNA, 21 bp, synthetic construct
  source 1..21: mol_type = other DNA
  misc_feature 1..21: note = n-mer motif encoding polynucleotide
gaatccctcccaatctctaaa

SEQ ID NO: 107 - DNA, 21 bp, synthetic construct
  source 1..21: mol_type = other DNA
  misc_feature 1..21: note = n-mer motif encoding polynucleotide
ggcaccgtcgttccgggctcc

SEQ ID NO: 108 - DNA, 21 bp, synthetic construct
  misc_feature 1..21: note = n-mer motif encoding polynucleotide
  source 1..21: mol_type = other DNA
ggattagctagtctacacctg

SEQ ID NO: 109 - DNA, 21 bp, synthetic construct
  source 1..21: mol_type = other DNA
  misc_feature 1..21: note = n-mer motif encoding polynucleotide
tatattgctgcgggtgagcag

SEQ ID NO: 110 - DNA, 21 bp, synthetic construct
  misc_feature 1..21: note = n-mer motif encoding polynucleotide
  source 1..21: mol_type = other DNA
aacacctaccccttcaacgcc

SEQ ID NO: 111 - DNA, 21 bp, synthetic construct
  misc_feature 1..21: note = n-mer motif encoding polynucleotide
  source 1..21: mol_type = other DNA
gttggtgcgagtacggcttcg

SEQ ID NO: 112 - DNA, 21 bp, synthetic construct
  source 1..21: mol_type = other DNA
  misc_feature 1..21: note = n-mer motif encoding polynucleotide
ggatccaactacttagcaaac

SEQ ID NO: 113 - DNA, 21 bp, synthetic construct
  misc_feature 1..21: note = n-mer motif encoding polynucleotide
  source 1..21: mol_type = other DNA
gatactggtcggacgggtacg

SEQ ID NO: 114 - DNA, 21 bp, synthetic construct
  source 1..21: mol_type = other DNA
  misc_feature 1..21: note = n-mer motif encoding polynucleotide
aagccgaatacgatgagtgat

SEQ ID NO: 115 - DNA, 21 bp, synthetic construct
  source 1..21: mol_type = other DNA
  misc_feature 1..21: note = n-mer motif encoding polynucleotide
gtagacaaatctagcccagtg

SEQ ID NO: 116 - DNA, 21 bp, synthetic construct
  source 1..21: mol_type = other DNA
  misc_feature 1..21: note = n-mer motif encoding polynucleotide
agttcggacccaaaaggtcaa

SEQ ID NO: 117 - DNA, 21 bp, synthetic construct
  misc_feature 1..21: note = n-mer motif encoding polynucleotide
  source 1..21: mol_type = other DNA
tggcagacgaatggtatgcag

SEQ ID NO: 118 - DNA, 21 bp, synthetic construct
  misc_feature 1..21: note = n-mer motif encoding polynucleotide
  source 1..21: mol_type = other DNA
accggtagcttgaactctatg

SEQ ID NO: 119 - DNA, 21 bp, synthetic construct
  source 1..21: mol_type = other DNA
  misc_feature 1..21: note = n-mer motif encoding polynucleotide
cattctaattcgagtcagaat

SEQ ID NO: 120 - DNA, 21 bp, synthetic construct
  source 1..21: mol_type = other DNA
  misc_feature 1..21: note = n-mer motif encoding polynucleotide
ggccgtgacgacctcacaaac

SEQ ID NO: 121 - DNA, 21 bp, synthetic construct
  source 1..21: mol_type = other DNA
  misc_feature 1..21: note = n-mer motif encoding polynucleotide
gatacttataagggtaagtgg

SEQ ID NO: 122 - DNA, 21 bp, synthetic construct
  misc_feature 1..21: note = n-mer motif encoding polynucleotide
  source 1..21: mol_type = other DNA
tatacggcgcagaccggctgg

SEQ ID NO: 123 - DNA, 21 bp, synthetic construct
  source 1..21: mol_type = other DNA
  misc_feature 1..21: note = n-mer motif encoding polynucleotide
aatcaggtgggtgcgtctgcg

SEQ ID NO: 124 - DNA, 21 bp, synthetic construct
  misc_feature 1..21: note = n-mer motif encoding polynucleotide
  source 1..21: mol_type = other DNA
atcgacgtactgaacggaagt

SEQ ID NO: 125 - DNA, 21 bp, synthetic construct
  misc_feature 1..21: note = n-mer motif encoding polynucleotide
  source 1..21: mol_type = other DNA
tttcggacggtgtatactggt

SEQ ID NO: 126 - DNA, 21 bp, synthetic construct
  source 1..21: mol_type = other DNA
  misc_feature 1..21: note = n-mer motif encoding polynucleotide
ggaaacatggtgactccaaac

SEQ ID NO: 127 - DNA, 21 bp, synthetic construct
  source 1..21: mol_type = other DNA
  misc_feature 1..21: note = n-mer motif encoding polynucleotide
gatacttataacggtaagtgg

SEQ ID NO: 128 - DNA, 21 bp, synthetic construct
  misc_feature 1..21: note = n-mer motif encoding polynucleotide
  source 1..21: mol_type = other DNA
accatccaagaccacataaaa

SEQ ID NO: 129 - DNA, 21 bp, synthetic construct
  misc_feature 1..21: note = n-mer motif encoding polynucleotide
  source 1..21: mol_type = other DNA
ggagcaaaaggaaccatgggc

SEQ ID NO: 130 - DNA, 21 bp, synthetic construct
  source 1..21: mol_type = other DNA
  misc_feature 1..21: note = n-mer motif encoding polynucleotide
acgaggagcaactccgacgaa

SEQ ID NO: 131 - DNA, 21 bp, synthetic construct
  source 1..21: mol_type = other DNA
  misc_feature 1..21: note = n-mer motif encoding polynucleotide
gctactactcttactggtgat

SEQ ID NO: 132 - DNA, 21 bp, synthetic construct
  source 1..21: mol_type = other DNA
  misc_feature 1..21: note = n-mer motif encoding polynucleotide
tcatacggaggatctggcccc

SEQ ID NO: 133 - DNA, 21 bp, synthetic construct
  misc_feature 1..21: note = n-mer motif encoding polynucleotide
  source 1..21: mol_type = other DNA
gaaaaatccgtcgaatccaaa

SEQ ID NO: 134 - DNA, 21 bp, synthetic construct
  misc_feature 1..21: note = n-mer motif encoding polynucleotide
  source 1..21: mol_type = other DNA
cgaggcgacacaatgaactac

SEQ ID NO: 135 - DNA, 21 bp, synthetic construct
  source 1..21: mol_type = other DNA
  misc_feature 1..21: note = n-mer motif encoding polynucleotide
cgggatctggggcagaccggc

SEQ ID NO: 136 - DNA, 21 bp, synthetic construct
  misc_feature 1..21: note = n-mer motif encoding polynucleotide
  source 1..21: mol_type = other DNA
agtccgcagctgagtgtgatg

SEQ ID NO: 137 - DNA, 21 bp, synthetic construct
  source 1..21: mol_type = other DNA
  misc_feature 1..21: note = n-mer motif encoding polynucleotide
cgaggagacaacagcacaccg

SEQ ID NO: 138 - DNA, 21 bp, synthetic construct
  source 1..21: mol_type = other DNA
  misc_feature 1..21: note = n-mer motif encoding polynucleotide
cctatggcaggacaccccccg

SEQ ID NO: 139 - DNA, 21 bp, synthetic construct
  misc_feature 1..21: note = n-mer motif encoding polynucleotide
  source 1..21: mol_type = other DNA
acggcgtatcaggctggtctg

SEQ ID NO: 140 - DNA, 21 bp, synthetic construct
  misc_feature 1..21: note = n-mer motif encoding polynucleotide
  source 1..21: mol_type = other DNA
gtggtaaaccaaggaaaccaa

SEQ ID NO: 141 - DNA, 21 bp, synthetic construct
  source 1..21: mol_type = other DNA
  misc_feature 1..21: note = n-mer motif encoding polynucleotide
gataagactgagatgctgcag

SEQ ID NO: 142 - DNA, 21 bp, synthetic construct
  misc_feature 1..21: note = n-mer motif encoding polynucleotide
  source 1..21: mol_type = other DNA
actgtgatgatgagtacgagg

SEQ ID NO: 143 - DNA, 21 bp, synthetic construct
  misc_feature 1..21: note = n-mer motif encoding polynucleotide
  source 1..21: mol_type = other DNA
cagcagaatacgcgtttgccg

SEQ ID NO: 144 - DNA, 21 bp, synthetic construct
  misc_feature 1..21: note = n-mer motif encoding polynucleotide
  source 1..21: mol_type = other DNA
taccaacacaaccaagcccac

SEQ ID NO: 145 - DNA, 21 bp, synthetic construct
  misc_feature 1..21: note = n-mer motif encoding polynucleotide
  source 1..21: mol_type = other DNA
aatcagagtattaataatatt

SEQ ID NO: 146 - DNA, 21 bp, synthetic construct
  source 1..21: mol_type = other DNA
  misc_feature 1..21: note = n-mer motif encoding polynucleotide
cgaggagaccacagcacaccg

SEQ ID NO: 147 - DNA, 21 bp, synthetic construct
  source 1..21: mol_type = other DNA
  misc_feature 1..21: note = n-mer motif encoding polynucleotide
gactctacacttcacttaagt

SEQ ID NO: 148 - DNA, 21 bp, synthetic construct
  source 1..21: mol_type = other DNA
  misc_feature 1..21: note = n-mer motif encoding polynucleotide
gcgaacatagaaaacacgtca

SEQ ID NO: 149 - DNA, 21 bp, synthetic construct
  source 1..21: mol_type = other DNA
  misc_feature 1..21: note = n-mer motif encoding polynucleotide
acaaacgctgctctagtacca

SEQ ID NO: 150 - DNA, 21 bp, synthetic construct
  misc_feature 1..21: note = n-mer motif encoding polynucleotide
  source 1..21: mol_type = other DNA
gggcagaaggagactactgcg

SEQ ID NO: 151 - DNA, 21 bp, synthetic construct
  misc_feature 1..21: note = n-mer motif encoding polynucleotide
  source 1..21: mol_type = other DNA
gaacttaacaccgcacacgca

SEQ ID NO: 152 - DNA, 21 bp, synthetic construct
  misc_feature 1..21: note = n-mer motif encoding polynucleotide
  source 1..21: mol_type = other DNA
ggtgttagtagtaattctgcg

SEQ ID NO: 153 - DNA, 21 bp, synthetic construct
  misc_feature 1..21: note = n-mer motif encoding polynucleotide
  source 1..21: mol_type = other DNA
agcacaaacgcgggacaaagg

SEQ ID NO: 154 - DNA, 21 bp, synthetic construct
  misc_feature 1..21: note = n-mer motif encoding polynucleotide
  source 1..21: mol_type = other DNA
gaacaacaaaaaacagacaac

SEQ ID NO: 155 - DNA, 21 bp, synthetic construct
  misc_feature 1..21: note = n-mer motif encoding polynucleotide
  source 1..21: mol_type = other DNA
gctgttgtgaatgagaatatg

SEQ ID NO: 156 - DNA, 21 bp, synthetic construct
  source 1..21: mol_type = other DNA
  misc_feature 1..21: note = n-mer motif encoding polynucleotide
ggcagcgtcagcaccagcgca

SEQ ID NO: 157 - DNA, 21 bp, synthetic construct
  misc_feature 1..21: note = n-mer motif encoding polynucleotide
  source 1..21: mol_type = other DNA
gagttgggtagtcagcgtatg

SEQ ID NO: 158 - DNA, 21 bp, synthetic construct
  misc_feature 1..21: note = n-mer motif encoding polynucleotide
  source 1..21: mol_type = other DNA
agaggcgacttatccacacac

SEQ ID NO: 159 - DNA, 21 bp, synthetic construct
  misc_feature 1..21: note = n-mer motif encoding polynucleotide
  source 1..21: mol_type = other DNA
gaccaccaacaagccctagct

SEQ ID NO: 160 - DNA, 21 bp, synthetic construct
  misc_feature 1..21: note = n-mer motif encoding polynucleotide
  source 1..21: mol_type = other DNA
aacagatctgacgctcacgaa

SEQ ID NO: 161 - DNA, 21 bp, synthetic construct
  source 1..21: mol_type = other DNA
  misc_feature 1..21: note = n-mer motif encoding polynucleotide
aatgttaatgcgcagagtagg

SEQ ID NO: 162 - DNA, 21 bp, synthetic construct
  misc_feature 1..21: note = n-mer motif encoding polynucleotide
  source 1..21: mol_type = other DNA
acccaagggaacaacatggta

SEQ ID NO: 163 - DNA, 21 bp, synthetic construct
  misc_feature 1..21: note = n-mer motif encoding polynucleotide
  source 1..21: mol_type = other DNA
acggcgctgaatacgtatcct

SEQ ID NO: 164 - DNA, 21 bp, synthetic construct
  misc_feature 1..21: note = n-mer motif encoding polynucleotide
  source 1..21: mol_type = other DNA
gtctctacatacctcctggca

SEQ ID NO: 165 - DNA, 21 bp, synthetic construct
  source 1..21: mol_type = other DNA
  misc_feature 1..21: note = n-mer motif encoding polynucleotide
ggcggcaactacaacacaact

SEQ ID NO: 166 - DNA, 21 bp, synthetic construct
  misc_feature 1..21: note = n-mer motif encoding polynucleotide
  source 1..21: mol_type = other DNA
agtaatattaagccggagatt

SEQ ID NO: 167 - DNA, 21 bp, synthetic construct
  source 1..21: mol_type = other DNA
  misc_feature 1..21: note = n-mer motif encoding polynucleotide
ccgagggtgcatggtcaggtt

SEQ ID NO: 168 - DNA, 21 bp, synthetic construct
  source 1..21: mol_type = other DNA
  misc_feature 1..21: note = n-mer motif encoding polynucleotide
tctaattctaatactgctgct

SEQ ID NO: 169 - DNA, 21 bp, synthetic construct
  misc_feature 1..21: note = n-mer motif encoding polynucleotide
  source 1..21: mol_type = other DNA
cttgaggtggcgacgagtccg

SEQ ID NO: 170 - DNA, 21 bp, synthetic construct
  source 1..21: mol_type = other DNA
  misc_feature 1..21: note = n-mer motif encoding polynucleotide
cacgacgccgacaaattagct

SEQ ID NO: 171 - DNA, 21 bp, synthetic construct
  misc_feature 1..21: note = n-mer motif encoding polynucleotide
  source 1..21: mol_type = other DNA
ggtgtgtatattgatggtcgg

SEQ ID NO: 172 - DNA, 21 bp, synthetic construct
  misc_feature 1..21: note = n-mer motif encoding polynucleotide
  source 1..21: mol_type = other DNA
tcgatgcagtcgtatacgatg

SEQ ID NO: 173 - DNA, 21 bp, synthetic construct
  source 1..21: mol_type = other DNA
  misc_feature 1..21: note = n-mer motif encoding polynucleotide
tctaaaggaaacgaacaaatg

SEQ ID NO: 174 - DNA, 21 bp, synthetic construct
  misc_feature 1..21: note = n-mer motif encoding polynucleotide
  source 1..21: mol_type = other DNA
ggtcgggattatgctatgagt

SEQ ID NO: 175 - DNA, 21 bp, synthetic construct
  source 1..21: mol_type = other DNA
  misc_feature 1..21: note = n-mer motif encoding polynucleotide
actgatggtatttttcagcct

SEQ ID NO: 176 - DNA, 21 bp, synthetic construct
  source 1..21: mol_type = other DNA
  misc_feature 1..21: note = n-mer motif encoding polynucleotide
gggagcccagtgatagtaaac

SEQ ID NO: 177 - DNA, 21 bp, synthetic construct
  source 1..21: mol_type = other DNA
  misc_feature 1..21: note = n-mer motif encoding polynucleotide
acattaacagacgttcaccga

SEQ ID NO: 178 - DNA, 21 bp, synthetic construct
  source 1..21: mol_type = other DNA
  misc_feature 1..21: note = n-mer motif encoding polynucleotide
aaaagcgaagtacccgcccga

SEQ ID NO: 179 - DNA, 21 bp, synthetic construct
  misc_feature 1..21: note = n-mer motif encoding polynucleotide
  source 1..21: mol_type = other DNA
gtcaacactggcgcactcttg

SEQ ID NO: 180 - DNA, 21 bp, synthetic construct
  source 1..21: mol_type = other DNA
  misc_feature 1..21: note = n-mer motif encoding polynucleotide
agtcagcagggttttactctg

SEQ ID NO: 181 - DNA, 21 bp, synthetic construct
  misc_feature 1..21: note = n-mer motif encoding polynucleotide
  source 1..21: mol_type = other DNA
aataataagtctgtgccggat

SEQ ID NO: 182 - DNA, 21 bp, synthetic construct
  misc_feature 1..21: note = n-mer motif encoding polynucleotide
  source 1..21: mol_type = other DNA
agtgtgatggtgggtacgaat

SEQ ID NO: 183 - DNA, 21 bp, synthetic construct
  misc_feature 1..21: note = n-mer motif encoding polynucleotide
  source 1..21: mol_type = other DNA
cgaaacgaaaacacttacaac

SEQ ID NO: 184 - DNA, 21 bp, synthetic construct
  misc_feature 1..21: note = n-mer motif encoding polynucleotide
  source 1..21: mol_type = other DNA
caagctaacttatcaataatc

SEQ ID NO: 185 - DNA, 21 bp, synthetic construct
  source 1..21: mol_type = other DNA
  misc_feature 1..21: note = n-mer motif encoding polynucleotide
cccggacgggacagcagaacg

SEQ ID NO: 186 - DNA, 21 bp, synthetic construct
  misc_feature 1..21: note = n-mer motif encoding polynucleotide
  source 1..21: mol_type = other DNA
tttccggctaatggtggtgct

SEQ ID NO: 187 - DNA, 21 bp, synthetic construct
  source 1..21: mol_type = other DNA
  misc_feature 1..21: note = n-mer motif encoding polynucleotide
gctggtaaggatcttagtaat

SEQ ID NO: 188 - DNA, 21 bp, synthetic construct
  source 1..21: mol_type = other DNA
  misc_feature 1..21: note = n-mer motif encoding polynucleotide
gcacaattcgaatcaggccga

SEQ ID NO: 189 - DNA, 21 bp, synthetic construct
  misc_feature 1..21: note = n-mer motif encoding polynucleotide
  source 1..21: mol_type = other DNA
ggatacggcagttacagcaac

SEQ ID NO: 190 - DNA, 21 bp, synthetic construct
  misc_feature 1..21: note = n-mer motif encoding polynucleotide
  source 1..21: mol_type = other DNA
acaatcgtttccgcttacgcc

SEQ ID NO: 191 - DNA, 21 bp, synthetic construct
  misc_feature 1..21: note = n-mer motif encoding polynucleotide
  source 1..21: mol_type = other DNA
aatgtgagtcctaatttgact

SEQ ID NO: 192 - DNA, 21 bp, synthetic construct
  misc_feature 1..21: note = n-mer motif encoding polynucleotide
  source 1..21: mol_type = other DNA
agaggcgacttatcaacaccc

SEQ ID NO: 193 - DNA, 21 bp, synthetic construct
  misc_feature 1..21: note = n-mer motif encoding polynucleotide
  source 1..21: mol_type = other DNA
ttcttagaaggagtcgctcaa

SEQ ID NO: 194 - DNA, 21 bp, synthetic construct
  misc_feature 1..21: note = n-mer motif encoding polynucleotide
  source 1..21: mol_type = other DNA
ggctccgaacgaggagaacga

SEQ ID NO: 195 - DNA, 21 bp, synthetic construct
  source 1..21: mol_type = other DNA
  misc_feature 1..21: note = n-mer motif encoding polynucleotide
ttgaatgttggttcgagtctt

SEQ ID NO: 196 - DNA, 21 bp, synthetic construct
  misc_feature 1..21: note = n-mer motif encoding polynucleotide
  source 1..21: mol_type = other DNA
cgtattgtggctaatgagcag

SEQ ID NO: 197 - DNA, 21 bp, synthetic construct
  source 1..21: mol_type = other DNA
  misc_feature 1..21: note = n-mer motif encoding polynucleotide
caatctatcggccaccccgtt

SEQ ID NO: 198 - DNA, 21 bp, synthetic construct
  misc_feature 1..21: note = n-mer motif encoding polynucleotide
  source 1..21: mol_type = other DNA
ggtggtatgtcggcgcattcg

SEQ ID NO: 199 - DNA, 21 bp, synthetic construct
  source 1..21: mol_type = other DNA
  misc_feature 1..21: note = n-mer motif encoding polynucleotide
cattctacgacgtctatgacg

SEQ ID NO: 200 - DNA, 21 bp, synthetic construct
  source 1..21: mol_type = other DNA
  misc_feature 1..21: note = n-mer motif encoding polynucleotide
actgtaaacggtacgaacgta

SEQ ID NO: 201 - DNA, 21 bp, synthetic construct
  misc_feature 1..21: note = n-mer motif encoding polynucleotide
  source 1..21: mol_type = other DNA
cttgcgcctgataatattggg

SEQ ID NO: 202 - DNA, 21 bp, synthetic construct
  misc_feature 1..21: note = n-mer motif encoding polynucleotide
  source 1..21: mol_type = other DNA
caaacagcgactctcgtggca

SEQ ID NO: 203 - DNA, 21 bp, synthetic construct
  misc_feature 1..21: note = n-mer motif encoding polynucleotide
  source 1..21: mol_type = other DNA
gcatcagcaccgtctgaattc

SEQ ID NO: 204 - DNA, 21 bp, synthetic construct
  source 1..21: mol_type = other DNA
  misc_feature 1..21: note = n-mer motif encoding polynucleotide
tcgatggagggtcagcagcat

SEQ ID NO: 205 - DNA, 21 bp, synthetic construct
  source 1..21: mol_type = other DNA
  misc_feature 1..21: note = n-mer motif encoding polynucleotide
caagacgtaggacgcacgaac

SEQ ID NO: 206 - DNA, 21 bp, synthetic construct
  misc_feature 1..21: note = n-mer motif encoding polynucleotide
  source 1..21: mol_type = other DNA
gtctacaacggcaacgaagta

SEQ ID NO: 207 - DNA, 21 bp, synthetic construct
  source 1..21: mol_type = other DNA
  misc_feature 1..21: note = n-mer motif encoding polynucleotide
gcacaggcgcagacaggctgg

SEQ ID NO: 208 - DNA, 21 bp, synthetic construct
  misc_feature 1..21: note = n-mer motif encoding polynucleotide
  source 1..21: mol_type = other DNA
cggctggatctgacgcatacg

SEQ ID NO: 209 - DNA, 21 bp, synthetic construct
  misc_feature 1..21: note = n-mer motif encoding polynucleotide
  source 1..21: mol_type = other DNA
gctgcacacggccgcgaacaa

SEQ ID NO: 210 - DNA, 21 bp, synthetic construct
  misc_feature 1..21: note = n-mer motif encoding polynucleotide
  source 1..21: mol_type = other DNA
agaggcgacttatacacaccc

SEQ ID NO: 211 - DNA, 21 bp, synthetic construct
  source 1..21: mol_type = other DNA
  misc_feature 1..21: note = n-mer motif encoding polynucleotide
ggtatgcagcagagggagaag

SEQ ID NO: 212 - DNA, 21 bp, synthetic construct
  misc_feature 1..21: note = n-mer motif encoding polynucleotide
  source 1..21: mol_type = other DNA
cagactcaggcgagtactaat

SEQ ID NO: 213 - DNA, 21 bp, synthetic construct
  source 1..21: mol_type = other DNA
  misc_feature 1..21: note = n-mer motif encoding polynucleotide
cgggacaccaacgccctcgga

SEQ ID NO: 214 - DNA, 21 bp, synthetic construct
  misc_feature 1..21: note = n-mer motif encoding polynucleotide
  source 1..21: mol_type = other DNA
tcgagtcagatttctaatagt

SEQ ID NO: 215 - DNA, 21 bp, synthetic construct
  misc_feature 1..21: note = n-mer motif encoding polynucleotide
  source 1..21: mol_type = other DNA
cagtcggttaatagtacgagt

SEQ ID NO: 216 - DNA, 21 bp, synthetic construct
  source 1..21: mol_type = other DNA
  misc_feature 1..21: note = n-mer motif encoding polynucleotide
gctctggagagggctcagtat

SEQ ID NO: 217 - DNA, 21 bp, synthetic construct
  misc_feature 1..21: note = n-mer motif encoding polynucleotide
  source 1..21: mol_type = other DNA
catactgggcatagttctgtg

SEQ ID NO: 218 - DNA, 21 bp, synthetic construct
  source 1..21: mol_type = other DNA
  misc_feature 1..21: note = n-mer motif encoding polynucleotide
cggggagacatgacccgagca

SEQ ID NO: 219 - DNA, 21 bp, synthetic construct
  source 1..21: mol_type = other DNA
  misc_feature 1..21: note = n-mer motif encoding polynucleotide
tttcagcgtgatcttgggcat

SEQ ID NO: 220 - DNA, 21 bp, synthetic construct
  misc_feature 1..21: note = n-mer motif encoding polynucleotide
  source 1..21: mol_type = other DNA
acaaccggcgacataatacgc

SEQ ID NO: 221 - DNA, 21 bp, synthetic construct
  misc_feature 1..21: note = n-mer motif encoding polynucleotide
  source 1..21: mol_type = other DNA
tcttttcagacggatcgtgcg

SEQ ID NO: 222 - DNA, 21 bp, synthetic construct
  misc_feature 1..21: note = n-mer motif encoding polynucleotide
  source 1..21: mol_type = other DNA
caatccagcgacggccgagtg

SEQ ID NO: 223 - DNA, 21 bp, synthetic construct
  misc_feature 1..21: note = n-mer motif encoding polynucleotide
  source 1..21: mol_type = other DNA
acttctggggctttgacccgg

SEQ ID NO: 224 - DNA, 21 bp, synthetic construct
  misc_feature 1..21: note = n-mer motif encoding polynucleotide
  source 1..21: mol_type = other DNA
aattcgaatactgtgaatacg

SEQ ID NO: 225 - DNA, 21 bp, synthetic construct
  misc_feature 1..21: note = n-mer motif encoding polynucleotide
  source 1..21: mol_type = other DNA
atctccggtagtagcagtcta

SEQ ID NO: 226 - DNA, 21 bp, synthetic construct
  misc_feature 1..21: note = n-mer motif encoding polynucleotide
  source 1..21: mol_type = other DNA
aacgacaaatcaaccaacgta

SEQ ID NO: 227 - DNA, 21 bp, synthetic construct
  misc_feature 1..21: note = n-mer motif encoding polynucleotide
  source 1..21: mol_type = other DNA
atcgtacttgctcccacatcg

SEQ ID NO: 228 - DNA, 21 bp, synthetic construct
  misc_feature 1..21: note = n-mer motif encoding polynucleotide
  source 1..21: mol_type = other DNA
tcaggcgtcaactacggtgtc

SEQ ID NO: 229 - DNA, 21 bp, synthetic construct
  misc_feature 1..21: note = n-mer motif encoding polynucleotide
  source 1..21: mol_type = other DNA
gtcggcgcccaacgggacccc

SEQ ID NO: 230 - DNA, 21 bp, synthetic construct
  misc_feature 1..21: note = n-mer motif encoding polynucleotide
  source 1..21: mol_type = other DNA
acgggtatgaatagtaataag

SEQ ID NO: 231 - DNA, 21 bp, synthetic construct
  misc_feature 1..21: note = n-mer motif encoding polynucleotide
  source 1..21: mol_type = other DNA
atcgaagcctactcacgagac

SEQ ID NO: 232 - DNA, 21 bp, synthetic construct
  source 1..21: mol_type = other DNA
  misc_feature 1..21: note = n-mer motif encoding polynucleotide
ttacacacaacactaatgccc

SEQ ID NO: 233 - DNA, 21 bp, synthetic construct
  misc_feature 1..21: note = n-mer motif encoding polynucleotide
  source 1..21: mol_type = other DNA
tctgataatcatctgaagact

SEQ ID NO: 234 - DNA, 21 bp, synthetic construct
  misc_feature 1..21: note = n-mer motif encoding polynucleotide
  source 1..21: mol_type = other DNA
cgaaacgaagacaaaggagga

SEQ ID NO: 235 - DNA, 21 bp, synthetic construct
  source 1..21: mol_type = other DNA
  misc_feature 1..21: note = n-mer motif encoding polynucleotide
acgaagggtgctaatggtact

SEQ ID NO: 236 - DNA, 21 bp, synthetic construct
  misc_feature 1..21: note = n-mer motif encoding polynucleotide
  source 1..21: mol_type = other DNA
gtctacaacggcaacgtagaa

SEQ ID NO: 237 - DNA, 21 bp, synthetic construct
  misc_feature 1..21: note = n-mer motif encoding polynucleotide
  source 1..21: mol_type = other DNA
tcaaacagcggaggcaaccac

SEQ ID NO: 238 - DNA, 21 bp, synthetic construct
  source 1..21: mol_type = other DNA
  misc_feature 1..21: note = n-mer motif encoding polynucleotide
gtagccgcgggaccagaagcg

SEQ ID NO: 239 - DNA, 21 bp, synthetic construct
  source 1..21: mol_type = other DNA
  misc_feature 1..21: note = n-mer motif encoding polynucleotide
acgtctcttagtggtagtgcg

SEQ ID NO: 240 - DNA, 21 bp, synthetic construct
  source 1..21: mol_type = other DNA
  misc_feature 1..21: note = n-mer motif encoding polynucleotide
gttgggctgcagagtaatact

SEQ ID NO: 241 - DNA, 21 bp, synthetic construct
  source 1..21: mol_type = other DNA
  misc_feature 1..21: note = n-mer motif encoding polynucleotide
cacaccgcccacagcgtggac

SEQ ID NO: 242 - DNA, 21 bp, synthetic construct
  misc_feature 1..21: note = n-mer motif encoding polynucleotide
  source 1..21: mol_type = other DNA
aacgtgggaatgagctcaacc

SEQ ID NO: 243 - DNA, 21 bp, synthetic construct
  source 1..21: mol_type = other DNA
  misc_feature 1..21: note = n-mer motif encoding polynucleotide
catgcggatgtgaatgctggg

SEQ ID NO: 244 - DNA, 21 bp, synthetic construct
  source 1..21: mol_type = other DNA
  misc_feature 1..21: note = n-mer motif encoding polynucleotide
aaagcgggacaactagtggaa

SEQ ID NO: 245 - DNA, 21 bp, synthetic construct
  misc_feature 1..21: note = n-mer motif encoding polynucleotide
  source 1..21: mol_type = other DNA
agtacttttagtgtgctgcct

SEQ ID NO: 246 - DNA, 21 bp, synthetic construct
  misc_feature 1..21: note = n-mer motif encoding polynucleotide
  source 1..21: mol_type = other DNA
cctcagtctccgagtcgggtt

SEQ ID NO: 247 - DNA, 21 bp, synthetic construct
  source 1..21: mol_type = other DNA
  misc_feature 1..21: note = n-mer motif encoding polynucleotide
cacaccgccacccttagcagc

SEQ ID NO: 248 - DNA, 21 bp, synthetic construct
  misc_feature 1..21: note = n-mer motif encoding polynucleotide
  source 1..21: mol_type = other DNA
cttccgcgtcatgatcagtat

SEQ ID NO: 249 - DNA, 21 bp, synthetic construct
  misc_feature 1..21: note = n-mer motif encoding polynucleotide
  source 1..21: mol_type = other DNA
caagtgaacaacccactcaca

SEQ ID NO: 250 - DNA, 21 bp, synthetic construct
  source 1..21: mol_type = other DNA
  misc_feature 1..21: note = n-mer motif encoding polynucleotide
acaacagaaaccgcacgaggt

SEQ ID NO: 251 - DNA, 21 bp, synthetic construct
  source 1..21: mol_type = other DNA
  misc_feature 1..21: note = n-mer motif encoding polynucleotide
gttcatgggacgttgacttat

SEQ ID NO: 252 - DNA, 21 bp, synthetic construct
  source 1..21: mol_type = other DNA
  misc_feature 1..21: note = n-mer motif encoding polynucleotide
tatagtactgatcttaggatg

SEQ ID NO: 253 - DNA, 21 bp, synthetic construct
  source 1..21: mol_type = other DNA
  misc_feature 1..21: note = n-mer motif encoding polynucleotide
gcacacgctacctcaagcact

SEQ ID NO: 254 - DNA, 21 bp, synthetic construct
  misc_feature 1..21: note = n-mer motif encoding polynucleotide
  source 1..21: mol_type = other DNA
agggagagtgctgctctggcg

SEQ ID NO: 255 - DNA, 21 bp, synthetic construct
  source 1..21: mol_type = other DNA
  misc_feature 1..21: note = n-mer motif encoding polynucleotide
aaggatactaatcagcagatt

SEQ ID NO: 256 - DNA, 21 bp, synthetic construct
  source 1..21: mol_type = other DNA
  misc_feature 1..21: note = n-mer motif encoding polynucleotide
agtatgcaatcatacaccatg

SEQ ID NO: 257 - DNA, 21 bp, synthetic construct
  source 1..21: mol_type = other DNA
  misc_feature 1..21: note = n-mer motif encoding polynucleotide
acagcctactcgcccacagtc

SEQ ID NO: 258 - DNA, 21 bp, synthetic construct
  source 1..21: mol_type = other DNA
  misc_feature 1..21: note = n-mer motif encoding polynucleotide
gaatctgcccaccaaagaata

SEQ ID NO: 259 - DNA, 21 bp, synthetic construct
  misc_feature 1..21: note = n-mer motif encoding polynucleotide
  source 1..21: mol_type = other DNA
agatacacaacagcacaacaa

SEQ ID NO: 260 - DNA, 21 bp, synthetic construct
  misc_feature 1..21: note = n-mer motif encoding polynucleotide
  source 1..21: mol_type = other DNA
acgtctgtggcgaatgtgagt

SEQ ID NO: 261 - DNA, 21 bp, synthetic construct
  source 1..21: mol_type = other DNA
  misc_feature 1..21: note = n-mer motif encoding polynucleotide
agggatcagcatacttctatt

SEQ ID NO: 262 - DNA, 21 bp, synthetic construct
  source 1..21: mol_type = other DNA
  misc_feature 1..21: note = n-mer motif encoding polynucleotide
tctgttacgtcttctggtccg

SEQ ID NO: 263 - DNA, 21 bp, synthetic construct
  source 1..21: mol_type = other DNA
  misc_feature 1..21: note = n-mer motif encoding polynucleotide
gcggttgttctgaatagtaat

SEQ ID NO: 264 - DNA, 21 bp, synthetic construct
  source 1..21: mol_type = other DNA
  misc_feature 1..21: note = n-mer motif encoding polynucleotide
cctgggaatccgtctagtaat

SEQ ID NO: 265 - DNA, 21 bp, synthetic construct
  misc_feature 1..21: note = n-mer motif encoding polynucleotide
  source 1..21: mol_type = other DNA
acggggtctactactcagctt

SEQ ID NO: 266 - DNA, 21 bp, synthetic construct
  misc_feature 1..21: note = n-mer motif encoding polynucleotide
  source 1..21: mol_type = other DNA
gctaatgagcataatgtgggt

SEQ ID NO: 267 - DNA, 21 bp, synthetic construct
  source 1..21: mol_type = other DNA
  misc_feature 1..21: note = n-mer motif encoding polynucleotide
atgcaaagagaagcagccaac

SEQ ID NO: 268 - DNA, 21 bp, synthetic construct
  misc_feature 1..21: note = n-mer motif encoding polynucleotide
  source 1..21: mol_type = other DNA
ttaaccgacacaaacacccgg

SEQ ID NO: 269 - DNA, 21 bp, synthetic construct
  source 1..21: mol_type = other DNA
  misc_feature 1..21: note = n-mer motif encoding polynucleotide
cgaatgaccgaaatatcatac

SEQ ID NO: 270 - DNA, 21 bp, synthetic construct
  source 1..21: mol_type = other DNA
  misc_feature 1..21: note = n-mer motif encoding polynucleotide
aaagtggacatgacctccaaa

SEQ ID NO: 271 - DNA, 21 bp, synthetic construct
  source 1..21: mol_type = other DNA
  misc_feature 1..21: note = n-mer motif encoding polynucleotide
agaggagacttatccacaccc

SEQ ID NO: 272 - DNA, 21 bp, synthetic construct
  misc_feature 1..21: note = n-mer motif encoding polynucleotide
  source 1..21: mol_type = other DNA
caagcaaaagctagcacaact

SEQ ID NO: 273 - DNA, 21 bp, synthetic construct
  misc_feature 1..21: note = n-mer motif encoding polynucleotide
  source 1..21: mol_type = other DNA
ctaccctcaacagaaactttg

SEQ ID NO: 274 - DNA, 21 bp, synthetic construct
  misc_feature 1..21: note = n-mer motif encoding polynucleotide
  source 1..21: mol_type = other DNA
agtagtgcgcttaatgcgtat

SEQ ID NO: 275 - DNA, 21 bp, synthetic construct
  misc_feature 1..21: note = n-mer motif encoding polynucleotide
  source 1..21: mol_type = other DNA
tcgtctgatcctaaggggcag

SEQ ID NO: 276 - DNA, 21 bp, synthetic construct
  source 1..21: mol_type = other DNA
  misc_feature 1..21: note = n-mer motif encoding polynucleotide
ttagacgtgacgagaatgaga

SEQ ID NO: 277 - DNA, 21 bp, synthetic construct
  source 1..21: mol_type = other DNA
  misc_feature 1..21: note = n-mer motif encoding polynucleotide
gcggatggtggtgataagggg

SEQ ID NO: 278 - DNA, 21 bp, synthetic construct
  misc_feature 1..21: note = n-mer motif encoding polynucleotide
  source 1..21: mol_type = other DNA
atgctgtctcaggttacgttg

SEQ ID NO: 279 - DNA, 21 bp, synthetic construct
  source 1..21: mol_type = other DNA
  misc_feature 1..21: note = n-mer motif encoding polynucleotide
agtgttagttctgtggtgttg

SEQ ID NO: 280 - DNA, 21 bp, synthetic construct
  misc_feature 1..21: note = n-mer motif encoding polynucleotide
  source 1..21: mol_type = other DNA
accgaatcgcaaaccatgagg

SEQ ID NO: 281 - DNA, 21 bp, synthetic construct
  misc_feature 1..21: note = n-mer motif encoding polynucleotide
  source 1..21: mol_type = other DNA
ttcggatcccaagaaaaactc

SEQ ID NO: 282 - DNA, 21 bp, synthetic construct
  source 1..21: mol_type = other DNA
  misc_feature 1..21: note = n-mer motif encoding polynucleotide
acagccggcggcgaacgcgcc

SEQ ID NO: 283 - DNA, 21 bp, synthetic construct
  source 1..21: mol_type = other DNA
  misc_feature 1..21: note = n-mer motif encoding polynucleotide
gatcatagtaagcagagttcg

SEQ ID NO: 284 - DNA, 21 bp, synthetic construct
  source 1..21: mol_type = other DNA
  misc_feature 1..21: note = n-mer motif encoding polynucleotide
attgatagtacttggaatacg

SEQ ID NO: 285 - DNA, 21 bp, synthetic construct
  misc_feature 1..21: note = n-mer motif encoding polynucleotide
  source 1..21: mol_type = other DNA
tcgcctcgccccgaactccga

SEQ ID NO: 286 - DNA, 21 bp, synthetic construct
  source 1..21: mol_type = other DNA
  misc_feature 1..21: note = n-mer motif encoding polynucleotide
agtattgcgactgctactagt

SEQ ID NO: 287 - DNA, 21 bp, synthetic construct
  misc_feature 1..21: note = n-mer motif encoding polynucleotide
  source 1..21: mol_type = other DNA
gtaataggcggacacgggact

SEQ ID NO: 288 - DNA, 21 bp, synthetic construct
  misc_feature 1..21: note = n-mer motif encoding polynucleotide
  source 1..21: mol_type = other DNA
agcaccgccatgtacccccac

SEQ ID NO: 289 - DNA, 21 bp, synthetic construct
  source 1..21: mol_type = other DNA
  misc_feature 1..21: note = n-mer motif encoding polynucleotide
cgggacttgagacccgtgacg

SEQ ID NO: 290 - DNA, 21 bp, synthetic construct
  source 1..21: mol_type = other DNA
  misc_feature 1..21: note = n-mer motif encoding polynucleotide
gctcatctgactgatcttccg

SEQ ID NO: 291 - DNA, 21 bp, synthetic construct
  source 1..21: mol_type = other DNA
  misc_feature 1..21: note = n-mer motif encoding polynucleotide
tttctgaatagtacgcagctt

SEQ ID NO: 292 - DNA, 21 bp, synthetic construct
  misc_feature 1..21: note = n-mer motif encoding polynucleotide
  source 1..21: mol_type = other DNA
ttaaacaacagtgccacagtc

SEQ ID NO: 293 - DNA, 21 bp, synthetic construct
  source 1..21: mol_type = other DNA
  misc_feature 1..21: note = n-mer motif encoding polynucleotide
gatcgtccgaataatatgacg

SEQ ID NO: 294 - DNA, 21 bp, synthetic construct
  source 1..21: mol_type = other DNA
  misc_feature 1..21: note = n-mer motif encoding polynucleotide
tcatcgtcagactcacccaga

SEQ ID NO: 295 - DNA, 21 bp, synthetic construct
  misc_feature 1..21: note = n-mer motif encoding polynucleotide
  source 1..21: mol_type = other DNA
cgcttggacgttggaagcccg

SEQ ID NO: 296 - DNA, 21 bp, synthetic construct
  source 1..21: mol_type = other DNA
  misc_feature 1..21: note = n-mer motif encoding polynucleotide
gcgcagcagagtcttcatggt

SEQ ID NO: 297 - DNA, 21 bp, synthetic construct
  misc_feature 1..21: note = n-mer motif encoding polynucleotide
  source 1..21: mol_type = other DNA
atggggaagcatgagggtctt

SEQ ID NO: 298 - DNA, 21 bp, synthetic construct
  misc_feature 1..21: note = n-mer motif encoding polynucleotide
  source 1..21: mol_type = other DNA
gagaatgctcgtgagggtgtg

SEQ ID NO: 299 - DNA, 21 bp, synthetic construct
  misc_feature 1..21: note = n-mer motif encoding polynucleotide
  source 1..21: mol_type = other DNA
accgtatctctctcggaaggc

SEQ ID NO: 300 - DNA, 21 bp, synthetic construct
  source 1..21: mol_type = other DNA
  misc_feature 1..21: note = n-mer motif encoding polynucleotide
cttaacacactaatcgaccgg

SEQ ID NO: 301 - DNA, 21 bp, synthetic construct
  source 1..21: mol_type = other DNA
  misc_feature 1..21: note = n-mer motif encoding polynucleotide
gaactctccgttccgaaacca

SEQ ID NO: 302 - DNA, 21 bp, synthetic construct
  source 1..21: mol_type = other DNA
  misc_feature 1..21: note = n-mer motif encoding polynucleotide
aaagacaaaaacgtatacata

SEQ ID NO: 303 - DNA, 21 bp, synthetic construct
  misc_feature 1..21: note = n-mer motif encoding polynucleotide
  source 1..21: mol_type = other DNA
aatgcgaatgggcctgtgagt

SEQ ID NO: 304 - DNA, 21 bp, synthetic construct
  source 1..21: mol_type = other DNA
  misc_feature 1..21: note = n-mer motif encoding polynucleotide
cttactacgaatggtatgctg

SEQ ID NO: 305 - DNA, 21 bp, synthetic construct
  source 1..21: mol_type = other DNA
  misc_feature 1..21: note = n-mer motif encoding polynucleotide
gccggcgaatcttcacccaca

SEQ ID NO: 306 - DNA, 21 bp, synthetic construct
  misc_feature 1..21: note = n-mer motif encoding polynucleotide
  source 1..21: mol_type = other DNA
agtgggattggtacttattct

SEQ ID NO: 307 - DNA, 21 bp, synthetic construct
  misc_feature 1..21: note = n-mer motif encoding polynucleotide
  source 1..21: mol_type = other DNA
gtcagatctatggacgaattg

SEQ ID NO: 308 - DNA, 21 bp, synthetic construct
  misc_feature 1..21: note = n-mer motif encoding polynucleotide
  source 1..21: mol_type = other DNA
atgaacaccggctcttcgagt

SEQ ID NO: 309 - DNA, 21 bp, synthetic construct
  source 1..21: mol_type = other DNA
  misc_feature 1..21: note = n-mer motif encoding polynucleotide
ggggtgactgttagggagctt

SEQ ID NO: 310 - DNA, 21 bp, synthetic construct
  source 1..21: mol_type = other DNA
  misc_feature 1..21: note = n-mer motif encoding polynucleotide
cagattttgaattatagtgtg

SEQ ID NO: 311 - DNA, 21 bp, synthetic construct
  misc_feature 1..21: note = n-mer motif encoding polynucleotide
  source 1..21: mol_type = other DNA
atggcgggtgagtatagggtt

SEQ ID NO: 312 - DNA, 21 bp, synthetic construct
  source 1..21: mol_type = other DNA
  misc_feature 1..21: note = n-mer motif encoding polynucleotide
tggtcgcatgatcggcctact

SEQ ID NO: 313 - DNA, 21 bp, synthetic construct
  misc_feature 1..21: note = n-mer motif encoding polynucleotide
  source 1..21: mol_type = other DNA
tgcaaaaacaactcagaatgc

SEQ ID NO: 314 - DNA, 21 bp, synthetic construct
  source 1..21: mol_type = other DNA
  misc_feature 1..21: note = n-mer motif encoding polynucleotide
ttgacgacgaatagtcattat

SEQ ID NO: 315 - DNA, 21 bp, synthetic construct
  source 1..21: mol_type = other DNA
  misc_feature 1..21: note = n-mer motif encoding polynucleotide
atgcttgttcagaatactcct

SEQ ID NO: 316 - DNA, 21 bp, synthetic construct
  source 1..21: mol_type = other DNA
  misc_feature 1..21: note = n-mer motif encoding polynucleotide
cgtggtgcgactgagcatgcg

SEQ ID NO: 317 - DNA, 21 bp, synthetic construct
  source 1..21: mol_type = other DNA
  misc_feature 1..21: note = n-mer motif encoding polynucleotide
gcttcgaatgggagtatgggt

SEQ ID NO: 318 - DNA, 21 bp, synthetic construct
  source 1..21: mol_type = other DNA
  misc_feature 1..21: note = n-mer motif encoding polynucleotide
aatagttatactgctgggaag

SEQ ID NO: 319 - DNA, 21 bp, synthetic construct
  source 1..21: mol_type = other DNA
  misc_feature 1..21: note = n-mer motif encoding polynucleotide
tccacccaaggagccatcctc

SEQ ID NO: 320 - DNA, 21 bp, synthetic construct
  source 1..21: mol_type = other DNA
  misc_feature 1..21: note = n-mer motif encoding polynucleotide
tggaatacgaatatggcgatt

SEQ ID NO: 321 - DNA, 21 bp, synthetic construct
  misc_feature 1..21: note = n-mer motif encoding polynucleotide
  source 1..21: mol_type = other DNA
gtctcatcgtacgaaaaaata

SEQ ID NO: 322 - DNA, 21 bp, synthetic construct
  misc_feature 1..21: note = n-mer motif encoding polynucleotide
  source 1..21: mol_type = other DNA
gtgctgagtacggggcagcgg

SEQ ID NO: 323 - DNA, 21 bp, synthetic construct
  misc_feature 1..21: note = n-mer motif encoding polynucleotide
  source 1..21: mol_type = other DNA
cctataccccacggttcatcc

SEQ ID NO: 324 - DNA, 21 bp, synthetic construct
  source 1..21: mol_type = other DNA
  misc_feature 1..21: note = n-mer motif encoding polynucleotide
aacgtgtcactaacgcaaacg

SEQ ID NO: 325 - DNA, 21 bp, synthetic construct
  misc_feature 1..21: note = n-mer motif encoding polynucleotide
  source 1..21: mol_type = other DNA
tctaccatcggcaacagcacg

SEQ ID NO: 326 - DNA, 21 bp, synthetic construct
  source 1..21: mol_type = other DNA
  misc_feature 1..21: note = n-mer motif encoding polynucleotide
tctgagaagctgactgataag

SEQ ID NO: 327 - DNA, 21 bp, synthetic construct
  source 1..21: mol_type = other DNA
  misc_feature 1..21: note = n-mer motif encoding polynucleotide
tccaaagactcgaacataagt

SEQ ID NO: 328 - DNA, 21 bp, synthetic construct
  misc_feature 1..21: note = n-mer motif encoding polynucleotide
  source 1..21: mol_type = other DNA
gcgaatagtaatcatgagcgt

SEQ ID NO: 329 - DNA, 21 bp, synthetic construct
  source 1..21: mol_type = other DNA
  misc_feature 1..21: note = n-mer motif encoding polynucleotide
agggatacgggtgataaggct

SEQ ID NO: 330 - DNA, 21 bp, synthetic construct
  source 1..21: mol_type = other DNA
  misc_feature 1..21: note = n-mer motif encoding polynucleotide
agaacagacacgccgtcaacc

SEQ ID NO: 331 - DNA, 21 bp, synthetic construct
  misc_feature 1..21: note = n-mer motif encoding polynucleotide
  source 1..21: mol_type = other DNA
cctactatgtcgagtctgaat

SEQ ID NO: 332 - DNA, 21 bp, synthetic construct
  source 1..21: mol_type = other DNA
  misc_feature 1..21: note = n-mer motif encoding polynucleotide
gatattactaatcagtcgtat

SEQ ID NO: 333 - DNA, 21 bp, synthetic construct
  source 1..21: mol_type = other DNA
  misc_feature 1..21: note = n-mer motif encoding polynucleotide
cttgtaaaaccggaaacttgg

SEQ ID NO: 334 - DNA, 21 bp, synthetic construct
  source 1..21: mol_type = other DNA
  misc_feature 1..21: note = n-mer motif encoding polynucleotide
gggacttccttggaaaaccga

SEQ ID NO: 335 - DNA, 21 bp, synthetic construct
  misc_feature 1..21: note = n-mer motif encoding polynucleotide
  source 1..21: mol_type = other DNA
gctgctggtaatcctactcgt

SEQ ID NO: 336 - DNA, 21 bp, synthetic construct
  source 1..21: mol_type = other DNA
  misc_feature 1..21: note = n-mer motif encoding polynucleotide
cacaacgtcggcctaggacac

SEQ ID NO: 337 - DNA, 21 bp, synthetic construct
  misc_feature 1..21: note = n-mer motif encoding polynucleotide
  source 1..21: mol_type = other DNA
gtatcaacgacaacggaccgg

SEQ ID NO: 338 - DNA, 21 bp, synthetic construct
  misc_feature 1..21: note = n-mer motif encoding polynucleotide
  source 1..21: mol_type = other DNA
tatttgtcgtctggtaagatg

SEQ ID NO: 339 - DNA, 21 bp, synthetic construct
  source 1..21: mol_type = other DNA
  misc_feature 1..21: note = n-mer motif encoding polynucleotide
gatagtcggaatgctgctttg

SEQ ID NO: 340 - DNA, 21 bp, synthetic construct
  source 1..21: mol_type = other DNA
  misc_feature 1..21: note = n-mer motif encoding polynucleotide
gtggagcggaatactgatatg

SEQ ID NO: 341 - DNA, 21 bp, synthetic construct
  source 1..21: mol_type = other DNA
  misc_feature 1..21: note = n-mer motif encoding polynucleotide
actgttgggagtaattctatt

SEQ ID NO: 342 - DNA, 21 bp, synthetic construct
  misc_feature 1..21: note = n-mer motif encoding polynucleotide
  source 1..21: mol_type = other DNA
gtgcggtctggtaataagccg

SEQ ID NO: 343 - DNA, 21 bp, synthetic construct
  source 1..21: mol_type = other DNA
  misc_feature 1..21: note = n-mer motif encoding polynucleotide
ggcagttcggggaacagcgga

SEQ ID NO: 344 - DNA, 21 bp, synthetic construct
  source 1..21: mol_type = other DNA
  misc_feature 1..21: note = n-mer motif encoding polynucleotide
tctacttcaataggagtggta

SEQ ID NO: 345 - DNA, 21 bp, synthetic construct
  source 1..21: mol_type = other DNA
  misc_feature 1..21: note = n-mer motif encoding polynucleotide
ccgagtcagagtaggtcgctt

SEQ ID NO: 346 - DNA, 21 bp, synthetic construct
  source 1..21: mol_type = other DNA
  misc_feature 1..21: note = n-mer motif encoding polynucleotide
cggaatgagaatcttaataat

SEQ ID NO: 347 - DNA, 21 bp, synthetic construct
  misc_feature 1..21: note = n-mer motif encoding polynucleotide
  source 1..21: mol_type = other DNA
tcgttgggtaagagggaggag

SEQ ID NO: 348 - DNA, 21 bp, synthetic construct
  source 1..21: mol_type = other DNA
  misc_feature 1..21: note = n-mer motif encoding polynucleotide
tcacgcttggactcgagctcc

SEQ ID NO: 349 - DNA, 21 bp, synthetic construct
  source 1..21: mol_type = other DNA
  misc_feature 1..21: note = n-mer motif encoding polynucleotide
gattcgacgtatgttttggct

SEQ ID NO: 350 - DNA, 21 bp, synthetic construct
  misc_feature 1..21: note = n-mer motif encoding polynucleotide
  source 1..21: mol_type = other DNA
gagcgtaatcctatttctgat

SEQ ID NO: 351 - DNA, 21 bp, synthetic construct
  source 1..21: mol_type = other DNA
  misc_feature 1..21: note = n-mer motif encoding polynucleotide
gttagctccggccacacgaaa

SEQ ID NO: 352 - DNA, 21 bp, synthetic construct
  misc_feature 1..21: note = n-mer motif encoding polynucleotide
  source 1..21: mol_type = other DNA
aagtatacggagtcgaatgcg

SEQ ID NO: 353 - DNA, 21 bp, synthetic construct
  source 1..21: mol_type = other DNA
  misc_feature 1..21: note = n-mer motif encoding polynucleotide
aaccgcaactcagttgggact

SEQ ID NO: 354 - DNA, 21 bp, synthetic construct
  source 1..21: mol_type = other DNA
  misc_feature 1..21: note = n-mer motif encoding polynucleotide
cacgaaagccactacgtgtca

SEQ ID NO: 355 - DNA, 21 bp, synthetic construct
  source 1..21: mol_type = other DNA
  misc_feature 1..21: note = n-mer motif encoding polynucleotide
acgactggggggacggggatg

SEQ ID NO: 356 - DNA, 21 bp, synthetic construct
  misc_feature 1..21: note = n-mer motif encoding polynucleotide
  source 1..21: mol_type = other DNA
gcgactgataagatgactcct

SEQ ID NO: 357 - DNA, 21 bp, synthetic construct
  source 1..21: mol_type = other DNA
  misc_feature 1..21: note = n-mer motif encoding polynucleotide
tccgcgtctagcggcgctaca

SEQ ID NO: 358 - DNA, 21 bp, synthetic construct
  source 1..21: mol_type = other DNA
  misc_feature 1..21: note = n-mer motif encoding polynucleotide
tcaaccactactggccacatg

SEQ ID NO: 359 - DNA, 21 bp, synthetic construct
  source 1..21: mol_type = other DNA
  misc_feature 1..21: note = n-mer motif encoding polynucleotide
ataatagcatcctctaccacg

SEQ ID NO: 360 - DNA, 21 bp, synthetic construct
  source 1..21: mol_type = other DNA
  misc_feature 1..21: note = n-mer motif encoding polynucleotide
gatactgggtctaggattgcg

SEQ ID NO: 361 - DNA, 21 bp, synthetic construct
  source 1..21: mol_type = other DNA
  misc_feature 1..21: note = n-mer motif encoding polynucleotide
tgggctgatgattcgcagcgg

SEQ ID NO: 362 - DNA, 21 bp, synthetic construct
  source 1..21: mol_type = other DNA
  misc_feature 1..21: note = n-mer motif encoding polynucleotide
aggggtaacactctcgaaatg

SEQ ID NO: 363 - DNA, 21 bp, synthetic construct
  misc_feature 1..21: note = n-mer motif encoding polynucleotide
  source 1..21: mol_type = other DNA
aatctgcaggtgaatgcgaat

SEQ ID NO: 364 - DNA, 21 bp, synthetic construct
  source 1..21: mol_type = other DNA
  misc_feature 1..21: note = n-mer motif encoding polynucleotide
gcgacgactcagctgatgact

SEQ ID NO: 365 - DNA, 21 bp, synthetic construct
  source 1..21: mol_type = other DNA
  misc_feature 1..21: note = n-mer motif encoding polynucleotide
gctgatacgaatattattgtg

SEQ ID NO: 366 - DNA, 21 bp, synthetic construct
  source 1..21: mol_type = other DNA
  misc_feature 1..21: note = n-mer motif encoding polynucleotide
gccataacaatcactcaaaaa

SEQ ID NO: 367 - DNA, 21 bp, synthetic construct
  misc_feature 1..21: note = n-mer motif encoding polynucleotide
  source 1..21: mol_type = other DNA
gactccaacaaaggagcgacg

SEQ ID NO: 368 - DNA, 21 bp, synthetic construct
  misc_feature 1..21: note = n-mer motif encoding polynucleotide
  source 1..21: mol_type = other DNA
ggcaacgcttccggaaaccca

SEQ ID NO: 369 - DNA, 21 bp, synthetic construct
  misc_feature 1..21: note = n-mer motif encoding polynucleotide
  source 1..21: mol_type = other DNA
acgatgggtgctaaaggtact

SEQ ID NO: 370 - DNA, 21 bp, synthetic construct
  source 1..21: mol_type = other DNA
  misc_feature 1..21: note = n-mer motif encoding polynucleotide
tatctgcagacgggtactctg

SEQ ID NO: 371 - DNA, 21 bp, synthetic construct
  misc_feature 1..21: note = n-mer motif encoding polynucleotide
  source 1..21: mol_type = other DNA
gcattacacaccaaagaccta

SEQ ID NO: 372 - DNA, 21 bp, synthetic construct
  source 1..21: mol_type = other DNA
  misc_feature 1..21: note = n-mer motif encoding polynucleotide
gtcgacaaaagcgaagccgtc

SEQ ID NO: 373 - DNA, 21 bp, synthetic construct
  misc_feature 1..21: note = n-mer motif encoding polynucleotide
  source 1..21: mol_type = other DNA
gggaggacggatcttatggcg

SEQ ID NO: 374 - DNA, 21 bp, synthetic construct
  source 1..21: mol_type = other DNA
  misc_feature 1..21: note = n-mer motif encoding polynucleotide
ggcacggaaccgcgcactgca

SEQ ID NO: 375 - DNA, 21 bp, synthetic construct
  misc_feature 1..21: note = n-mer motif encoding polynucleotide
  source 1..21: mol_type = other DNA
agaggcgacatgtcacgagaa

SEQ ID NO: 376 - DNA, 21 bp, synthetic construct
  source 1..21: mol_type = other DNA
  misc_feature 1..21: note = n-mer motif encoding polynucleotide
cggggggatactaagtctaag

SEQ ID NO: 377 - DNA, 21 bp, synthetic construct
  misc_feature 1..21: note = n-mer motif encoding polynucleotide
  source 1..21: mol_type = other DNA
gggacattagcctcaatgtcc

SEQ ID NO: 378 - DNA, 21 bp, synthetic construct
  source 1..21: mol_type = other DNA
  misc_feature 1..21: note = n-mer motif encoding polynucleotide
cagaagtctgtgacgtattcg

SEQ ID NO: 379 - DNA, 21 bp, synthetic construct
  source 1..21: mol_type = other DNA
  misc_feature 1..21: note = n-mer motif encoding polynucleotide
agtacggggcagactcttgtt

SEQ ID NO: 380 - DNA, 21 bp, synthetic construct
  misc_feature 1..21: note = n-mer motif encoding polynucleotide
  source 1..21: mol_type = other DNA
tcgcacataaacatggggtcg

SEQ ID NO: 381 - DNA, 21 bp, synthetic construct
  misc_feature 1..21: note = n-mer motif encoding polynucleotide
  source 1..21: mol_type = other DNA
gcgttgaatggtactggtaat

SEQ ID NO: 382 - DNA, 21 bp, synthetic construct
  source 1..21: mol_type = other DNA
  misc_feature 1..21: note = n-mer motif encoding polynucleotide
actacgagttcgaatcagcat

SEQ ID NO: 383 - DNA, 21 bp, synthetic construct
  source 1..21: mol_type = other DNA
  misc_feature 1..21: note = n-mer motif encoding polynucleotide
aaaaactacgcaagcaccgac

SEQ ID NO: 384 - DNA, 21 bp, synthetic construct
  source 1..21: mol_type = other DNA
  misc_feature 1..21: note = n-mer motif encoding polynucleotide
gaatccacaagcaggacgtac

SEQ ID NO: 385 - DNA, 21 bp, synthetic construct
  source 1..21: mol_type = other DNA
  misc_feature 1..21: note = n-mer motif encoding polynucleotide
ccgcgttctattacggagttg

SEQ ID NO: 386 - DNA, 21 bp, synthetic construct
  misc_feature 1..21: note = n-mer motif encoding polynucleotide
  source 1..21: mol_type = other DNA
tacatagccggaggagaaaaa

SEQ ID NO: 387 - DNA, 21 bp, synthetic construct
  misc_feature 1..21: note = n-mer motif encoding polynucleotide
  source 1..21: mol_type = other DNA
actagtaattatatgcatgag

SEQ ID NO: 388 - DNA, 21 bp, synthetic construct
  source 1..21: mol_type = other DNA
  misc_feature 1..21: note = n-mer motif encoding polynucleotide
ttggatcctaatagtactcgg

SEQ ID NO: 389 - DNA, 21 bp, synthetic construct
  source 1..21: mol_type = other DNA
  misc_feature 1..21: note = n-mer motif encoding polynucleotide
cacagtgacatgggctcaagc

SEQ ID NO: 390 - DNA, 21 bp, synthetic construct
  misc_feature 1..21: note = n-mer motif encoding polynucleotide
  source 1..21: mol_type = other DNA
gacaccgccaaccgatccaca

SEQ ID NO: 391 - DNA, 21 bp, synthetic construct
  source 1..21: mol_type = other DNA
  misc_feature 1..21: note = n-mer motif encoding polynucleotide
aacgccggacacagcggtcaa

SEQ ID NO: 392 - DNA, 21 bp, synthetic construct
  misc_feature 1..21: note = n-mer motif encoding polynucleotide
  source 1..21: mol_type = other DNA
agtttggggtcggatcgtatg

SEQ ID NO: 393 - DNA, 21 bp, synthetic construct
  misc_feature 1..21: note = n-mer motif encoding polynucleotide
  source 1..21: mol_type = other DNA
gacaaccaacaagccctagct

SEQ ID NO: 394 - DNA, 21 bp, synthetic construct
  misc_feature 1..21: note = n-mer motif encoding polynucleotide
  source 1..21: mol_type = other DNA
ccatcctcagcgggtagcaca

SEQ ID NO: 395 - DNA, 21 bp, synthetic construct
  source 1..21: mol_type = other DNA
  misc_feature 1..21: note = n-mer motif encoding polynucleotide
gacaggaaagggtacgacgca

SEQ ID NO: 396 - DNA, 21 bp, synthetic construct
  source 1..21: mol_type = other DNA
  misc_feature 1..21: note = n-mer motif encoding polynucleotide
ggaggaaaccaaaaccttact

SEQ ID NO: 397 - DNA, 21 bp, synthetic construct
  source 1..21: mol_type = other DNA
  misc_feature 1..21: note = n-mer motif encoding polynucleotide
gtgaatctgaatgagacggag

SEQ ID NO: 398 - DNA, 21 bp, synthetic construct
  source 1..21: mol_type = other DNA
  misc_feature 1..21: note = n-mer motif encoding polynucleotide
tcccccggcaacgggttgcta

SEQ ID NO: 399 - DNA, 21 bp, synthetic construct
  misc_feature 1..21: note = n-mer motif encoding polynucleotide
  source 1..21: mol_type = other DNA
tctgtcggggacctcacaaaa

SEQ ID NO: 400 - DNA, 21 bp, synthetic construct
  misc_feature 1..21: note = n-mer motif encoding polynucleotide
  source 1..21: mol_type = other DNA
cgatacgaatccgtcggactc

SEQ ID NO: 401 - DNA, 21 bp, synthetic construct
  misc_feature 1..21: note = n-mer motif encoding polynucleotide
  source 1..21: mol_type = other DNA
acgagagaattgacaaaaaac

SEQ ID NO: 402 - DNA, 21 bp, synthetic construct
  source 1..21: mol_type = other DNA
  misc_feature 1..21: note = n-mer motif encoding polynucleotide
actccaactaacgggaaccct

SEQ ID NO: 403 - DNA, 21 bp, synthetic construct
  misc_feature 1..21: note = n-mer motif encoding polynucleotide
  source 1..21: mol_type = other DNA
gcgactgatcagcgttcgagg

SEQ ID NO: 404 - DNA, 21 bp, synthetic construct
  source 1..21: mol_type = other DNA
  misc_feature 1..21: note = n-mer motif encoding polynucleotide
ggaacatcggcagaatcacgc

SEQ ID NO: 405 - DNA, 21 bp, synthetic construct
  misc_feature 1..21: note = n-mer motif encoding polynucleotide
  source 1..21: mol_type = other DNA
aggatgctctctactttgcct

SEQ ID NO: 406 - DNA, 21 bp, synthetic construct
  source 1..21: mol_type = other DNA
  misc_feature 1..21: note = n-mer motif encoding polynucleotide
ggtatcaactcctcacacttc

SEQ ID NO: 407 - DNA, 21 bp, synthetic construct
  misc_feature 1..21: note = n-mer motif encoding polynucleotide
  source 1..21: mol_type = other DNA
agtagctcaactgaagggcaa

SEQ ID NO: 408 - DNA, 21 bp, synthetic construct
  misc_feature 1..21: note = n-mer motif encoding polynucleotide
  source 1..21: mol_type = other DNA
gacaaacaacaaaccggacaa

SEQ ID NO: 409 - DNA, 21 bp, synthetic construct
  misc_feature 1..21: note = n-mer motif encoding polynucleotide
  source 1..21: mol_type = other DNA
acccaacacctaccatccaca

SEQ ID NO: 410 - DNA, 21 bp, synthetic construct
  source 1..21: mol_type = other DNA
  misc_feature 1..21: note = n-mer motif encoding polynucleotide
ggtctggggcagcctcagttg

SEQ ID NO: 411 - DNA, 21 bp, synthetic construct
  misc_feature 1..21: note = n-mer motif encoding polynucleotide
  source 1..21: mol_type = other DNA
gtgactaatgagagtcgtgct

SEQ ID NO: 412 - DNA, 21 bp, synthetic construct
  misc_feature 1..21: note = n-mer motif encoding polynucleotide
  source 1..21: mol_type = other DNA
ggcaactcgaactaccgagaa

SEQ ID NO: 413 - DNA, 21 bp, synthetic construct
  misc_feature 1..21: note = n-mer motif encoding polynucleotide
  source 1..21: mol_type = other DNA
tggaatgctgagaatagtaag

SEQ ID NO: 414 - DNA, 21 bp, synthetic construct
  source 1..21: mol_type = other DNA
  misc_feature 1..21: note = n-mer motif encoding polynucleotide
cctgggagtcagcgtcaggat

SEQ ID NO: 415 - DNA, 21 bp, synthetic construct
  source 1..21: mol_type = other DNA
  misc_feature 1..21: note = n-mer motif encoding polynucleotide
catacgtattcgcaggctgat

SEQ ID NO: 416 - DNA, 21 bp, synthetic construct
  misc_feature 1..21: note = n-mer motif encoding polynucleotide
  source 1..21: mol_type = other DNA
actgccggcaacctaagaagt

SEQ ID NO: 417 - DNA, 21 bp, synthetic construct
  source 1..21: mol_type = other DNA
  misc_feature 1..21: note = n-mer motif encoding polynucleotide
ggcagacaccttcaatcggac

SEQ ID NO: 418 - DNA, 21 bp, synthetic construct
  misc_feature 1..21: note = n-mer motif encoding polynucleotide
  source 1..21: mol_type = other DNA
aacaacgcacacaccgccact

SEQ ID NO: 419 - DNA, 21 bp, synthetic construct
  misc_feature 1..21: note = n-mer motif encoding polynucleotide
  source 1..21: mol_type = other DNA
agtacgagtcaggagaatagg

SEQ ID NO: 420 - DNA, 21 bp, synthetic construct
  source 1..21: mol_type = other DNA
  misc_feature 1..21: note = n-mer motif encoding polynucleotide
aggggtgatactatgaattat

SEQ ID NO: 421 - DNA, 21 bp, synthetic construct
  source 1..21: mol_type = other DNA
  misc_feature 1..21: note = n-mer motif encoding polynucleotide
ccggttgctactcagcatgcg

SEQ ID NO: 422 - DNA, 21 bp, synthetic construct
  misc_feature 1..21: note = n-mer motif encoding polynucleotide
  source 1..21: mol_type = other DNA
gggcatttgaatgctccgact

SEQ ID NO: 423 - DNA, 21 bp, synthetic construct
  misc_feature 1..21: note = n-mer motif encoding polynucleotide
  source 1..21: mol_type = other DNA
caaatattaaactactcagtc

SEQ ID NO: 424 - DNA, 21 bp, synthetic construct
  source 1..21: mol_type = other DNA
  misc_feature 1..21: note = n-mer motif encoding polynucleotide
caaaaccacgcgtctggtgaa

SEQ ID NO: 425 - DNA, 21 bp, synthetic construct
  source 1..21: mol_type = other DNA
  misc_feature 1..21: note = n-mer motif encoding polynucleotide
ggtttaacagggcgggaacta

SEQ ID NO: 426 - DNA, 21 bp, synthetic construct
  source 1..21: mol_type = other DNA
  misc_feature 1..21: note = n-mer motif encoding polynucleotide
gacgtagccgtgactcaacac

SEQ ID NO: 427 - DNA, 21 bp, synthetic construct
  source 1..21: mol_type = other DNA
  misc_feature 1..21: note = n-mer motif encoding polynucleotide
gcaacttacaccgggcgaaca

SEQ ID NO: 428 - DNA, 21 bp, synthetic construct
  misc_feature 1..21: note = n-mer motif encoding polynucleotide
  source 1..21: mol_type = other DNA
aaagaactacaatggcaacga

SEQ ID NO: 429 - DNA, 21 bp, synthetic construct
  misc_feature 1..21: note = n-mer motif encoding polynucleotide
  source 1..21: mol_type = other DNA
gctagttatagtagtatggtg

SEQ ID NO: 430 - DNA, 21 bp, synthetic construct
  misc_feature 1..21: note = n-mer motif encoding polynucleotide
  source 1..21: mol_type = other DNA
gttattagtcatggggcgctg

SEQ ID NO: 431 - DNA, 21 bp, synthetic construct
  source 1..21: mol_type = other DNA
  misc_feature 1..21: note = n-mer motif encoding polynucleotide
cctatacaccacggttcatcc

SEQ ID NO: 432 - DNA, 21 bp, synthetic construct
  misc_feature 1..21: note = n-mer motif encoding polynucleotide
  source 1..21: mol_type = other DNA
gtggataagaatcatcctttg

SEQ ID NO: 433 - DNA, 21 bp, synthetic construct
  misc_feature 1..21: note = n-mer motif encoding polynucleotide
  source 1..21: mol_type = other DNA
acctcgggtgaccggtacacg

SEQ ID NO: 434 - DNA, 21 bp, synthetic construct
  source 1..21: mol_type = other DNA
  misc_feature 1..21: note = n-mer motif encoding polynucleotide
gggacaaaaagctggcctgtc

SEQ ID NO: 435 - DNA, 21 bp, synthetic construct
  misc_feature 1..21: note = n-mer motif encoding polynucleotide
  source 1..21: mol_type = other DNA
tacaacgcccacgaatcattc

SEQ ID NO: 436 - DNA, 21 bp, synthetic construct
  source 1..21: mol_type = other DNA
  misc_feature 1..21: note = n-mer motif encoding polynucleotide
agagtccacgacactccttca

SEQ ID NO: 437 - DNA, 21 bp, synthetic construct
  misc_feature 1..21: note = n-mer motif encoding polynucleotide
  source 1..21: mol_type = other DNA
gcacaaatcgaatcaggccga

SEQ ID NO: 438 - DNA, 21 bp, synthetic construct
  misc_feature 1..21: note = n-mer motif encoding polynucleotide
  source 1..21: mol_type = other DNA
tggaaggataatatgcggatg

SEQ ID NO: 439 - DNA, 21 bp, synthetic construct
  misc_feature 1..21: note = n-mer motif encoding polynucleotide
  source 1..21: mol_type = other DNA
atgcctagtgaaccaccaggg

SEQ ID NO: 440 - DNA, 21 bp, synthetic construct
  misc_feature 1..21: note = n-mer motif encoding polynucleotide
  source 1..21: mol_type = other DNA
cgtggtgattatccgacgtcg

SEQ ID NO: 441 - DNA, 21 bp, synthetic construct
  source 1..21: mol_type = other DNA
  misc_feature 1..21: note = n-mer motif encoding polynucleotide
tttcataatgagtcttatggg

SEQ ID NO: 442 - DNA, 21 bp, synthetic construct
  source 1..21: mol_type = other DNA
  misc_feature 1..21: note = n-mer motif encoding polynucleotide
ttgaatacgatgattgataag

SEQ ID NO: 443 - DNA, 21 bp, synthetic construct
  source 1..21: mol_type = other DNA
  misc_feature 1..21: note = n-mer motif encoding polynucleotide
tccacactaagccaaggagca

SEQ ID NO: 444 - DNA, 21 bp, synthetic construct
  source 1..21: mol_type = other DNA
  misc_feature 1..21: note = n-mer motif encoding polynucleotide
cctttgcacaacatacctcct

SEQ ID NO: 445 - DNA, 21 bp, synthetic construct
  source 1..21: mol_type = other DNA
  misc_feature 1..21: note = n-mer motif encoding polynucleotide
gcttcgtctacgtttttgcct

SEQ ID NO: 446 - DNA, 21 bp, synthetic construct
  misc_feature 1..21: note = n-mer motif encoding polynucleotide
  source 1..21: mol_type = other DNA
atggaaggaatgggactcgga

SEQ ID NO: 447 - DNA, 21 bp, synthetic construct
  misc_feature 1..21: note = n-mer motif encoding polynucleotide
  source 1..21: mol_type = other DNA
aaggattataagccgtatgct

SEQ ID NO: 448 - DNA, 21 bp, synthetic construct
  misc_feature 1..21: note = n-mer motif encoding polynucleotide
  source 1..21: mol_type = other DNA
aatttgcagtctggtgttcag

SEQ ID NO: 449 - DNA, 21 bp, synthetic construct
  misc_feature 1..21: note = n-mer motif encoding polynucleotide
  source 1..21: mol_type = other DNA
acaactcttagccaacaaagc

SEQ ID NO: 450 - DNA, 21 bp, synthetic construct
  source 1..21: mol_type = other DNA
  misc_feature 1..21: note = n-mer motif encoding polynucleotide
cttatgtcgtctacttcctca

SEQ ID NO: 451 - DNA, 21 bp, synthetic construct
  source 1..21: mol_type = other DNA
  misc_feature 1..21: note = n-mer motif encoding polynucleotide
actggccaaggattctcggca

SEQ ID NO: 452 - DNA, 21 bp, synthetic construct
  misc_feature 1..21: note = n-mer motif encoding polynucleotide
  source 1..21: mol_type = other DNA
tctacaatcggcaacagcacg

SEQ ID NO: 453 - DNA, 21 bp, synthetic construct
  source 1..21: mol_type = other DNA
  misc_feature 1..21: note = n-mer motif encoding polynucleotide
ctgagggcgagtgaggctccg

SEQ ID NO: 454 - DNA, 21 bp, synthetic construct
  source 1..21: mol_type = other DNA
  misc_feature 1..21: note = n-mer motif encoding polynucleotide
cagcctaataatggtaatcat

SEQ ID NO: 455 - DNA, 21 bp, synthetic construct
  source 1..21: mol_type = other DNA
  misc_feature 1..21: note = n-mer motif encoding polynucleotide
tcgtcagacgttaccagacaa

SEQ ID NO: 456 - DNA, 21 bp, synthetic construct
  misc_feature 1..21: note = n-mer motif encoding polynucleotide
  source 1..21: mol_type = other DNA
cggggtgacgcaacagaaatg

SEQ ID NO: 457 - DNA, 21 bp, synthetic construct
  source 1..21: mol_type = other DNA
  misc_feature 1..21: note = n-mer motif encoding polynucleotide
tataggggtagggaggattgg

SEQ ID NO: 458 - DNA, 21 bp, synthetic construct
  misc_feature 1..21: note = n-mer motif encoding polynucleotide
  source 1..21: mol_type = other DNA
agcttgcaacaatcacaattg

SEQ ID NO: 459 - DNA, 21 bp, synthetic construct
  misc_feature 1..21: note = n-mer motif encoding polynucleotide
  source 1..21: mol_type = other DNA
aagccgactgcgaatgattgg

SEQ ID NO: 460 - DNA, 21 bp, synthetic construct
  source 1..21: mol_type = other DNA
  misc_feature 1..21: note = n-mer motif encoding polynucleotide
cgtctgactgatactatgcat

SEQ ID NO: 461 - DNA, 21 bp, synthetic construct
  source 1..21: mol_type = other DNA
  misc_feature 1..21: note = n-mer motif encoding polynucleotide
cttcatgggaattatagtccg

SEQ ID NO: 462 - DNA, 21 bp, synthetic construct
  misc_feature 1..21: note = n-mer motif encoding polynucleotide
  source 1..21: mol_type = other DNA
attccggttggggcgatggct

SEQ ID NO: 463 - DNA, 21 bp, synthetic construct
  source 1..21: mol_type = other DNA
  misc_feature 1..21: note = n-mer motif encoding polynucleotide
ccgaacaccgcctcaaacttc

SEQ ID NO: 464 - DNA, 21 bp, synthetic construct
  misc_feature 1..21: note = n-mer motif encoding polynucleotide
  source 1..21: mol_type = other DNA
acgagtagagaagtcaaaggg

SEQ ID NO: 465 - DNA, 21 bp, synthetic construct
  misc_feature 1..21: note = n-mer motif encoding polynucleotide
  source 1..21: mol_type = other DNA
gacacgtcctccggcaacagg

SEQ ID NO: 466 - DNA, 21 bp, synthetic construct
  misc_feature 1..21: note = n-mer motif encoding polynucleotide
  source 1..21: mol_type = other DNA
gaagcagtaacaagtaaatgg

SEQ ID NO: 467 - DNA, 21 bp, synthetic construct
  source 1..21: mol_type = other DNA
  misc_feature 1..21: note = n-mer motif encoding polynucleotide
ctaatcacagccaccactaac

SEQ ID NO: 468 - DNA, 21 bp, synthetic construct
  misc_feature 1..21: note = n-mer motif encoding polynucleotide
  source 1..21: mol_type = other DNA
gatgggggtcgttcgggtatt

SEQ ID NO: 469 - DNA, 21 bp, synthetic construct
  misc_feature 1..21: note = n-mer motif encoding polynucleotide
  source 1..21: mol_type = other DNA
ttcatggaagtcatgaaaaac

SEQ ID NO: 470 - DNA, 21 bp, synthetic construct
  misc_feature 1..21: note = n-mer motif encoding polynucleotide
  source 1..21: mol_type = other DNA
tcctaccaaaacccaccacca

SEQ ID NO: 471 - DNA, 21 bp, synthetic construct
  source 1..21: mol_type = other DNA
  misc_feature 1..21: note = n-mer motif encoding polynucleotide
actaatgtgacgtttaagctt

SEQ ID NO: 472 - DNA, 21 bp, synthetic construct
  source 1..21: mol_type = other DNA
  misc_feature 1..21: note = n-mer motif encoding polynucleotide
atttctacgcatacgatgacg

SEQ ID NO: 473 - DNA, 21 bp, synthetic construct
  misc_feature 1..21: note = n-mer motif encoding polynucleotide
  source 1..21: mol_type = other DNA
gaaacccaaggagcaagatac

SEQ ID NO: 474 - DNA, 21 bp, synthetic construct
  misc_feature 1..21: note = n-mer motif encoding polynucleotide
  source 1..21: mol_type = other DNA
gcggcttatgagcatgcgcct

SEQ ID NO: 475 - DNA, 21 bp, synthetic construct
  source 1..21: mol_type = other DNA
  misc_feature 1..21: note = n-mer motif encoding polynucleotide
tcaacgaacgaccgtgcgtta

SEQ ID NO: 476 - DNA, 21 bp, synthetic construct
  misc_feature 1..21: note = n-mer motif encoding polynucleotide
  source 1..21: mol_type = other DNA
ttcaccgaacgcgcactccaa

SEQ ID NO: 477 - DNA, 21 bp, synthetic construct
  source 1..21: mol_type = other DNA
  misc_feature 1..21: note = n-mer motif encoding polynucleotide
gtagcgggcttagtcgacata

SEQ ID NO: 478 - DNA, 21 bp, synthetic construct
  misc_feature 1..21: note = n-mer motif encoding polynucleotide
  source 1..21: mol_type = other DNA
agctcggtaactaaccttgca

SEQ ID NO: 479 - DNA, 21 bp, synthetic construct
  source 1..21: mol_type = other DNA
  misc_feature 1..21: note = n-mer motif encoding polynucleotide
gatactactactggtcatctt

SEQ ID NO: 480 - DNA, 21 bp, synthetic construct
  source 1..21: mol_type = other DNA
  misc_feature 1..21: note = n-mer motif encoding polynucleotide
acgcgtaatttgtctgagagt

SEQ ID NO: 481 - DNA, 21 bp, synthetic construct
  source 1..21: mol_type = other DNA
  misc_feature 1..21: note = n-mer motif encoding polynucleotide
caggtgaatgttgggcctggt

SEQ ID NO: 482 - DNA, 21 bp, synthetic construct
  source 1..21: mol_type = other DNA
  misc_feature 1..21: note = n-mer motif encoding polynucleotide
aaacaaacgatgtccgacaca

SEQ ID NO: 483 - DNA, 21 bp, synthetic construct
  source 1..21: mol_type = other DNA
  misc_feature 1..21: note = n-mer motif encoding polynucleotide
atgtcgacaaccagcaaaact

SEQ ID NO: 484 - DNA, 21 bp, synthetic construct
  misc_feature 1..21: note = n-mer motif encoding polynucleotide
  source 1..21: mol_type = other DNA
actacaatagggacaaaccaa

SEQ ID NO: 485 - DNA, 21 bp, synthetic construct
  source 1..21: mol_type = other DNA
  misc_feature 1..21: note = n-mer motif encoding polynucleotide
gggactctgacgccgaatctt

SEQ ID NO: 486 - DNA, 21 bp, synthetic construct
  source 1..21: mol_type = other DNA
  misc_feature 1..21: note = n-mer motif encoding polynucleotide
tttgatagttataatattgtg

SEQ ID NO: 487 - DNA, 21 bp, synthetic construct
  misc_feature 1..21: note = n-mer motif encoding polynucleotide
  source 1..21: mol_type = other DNA
cgtggtgcgcctgagcaagcg

SEQ ID NO: 488 - DNA, 21 bp, synthetic construct
  misc_feature 1..21: note = n-mer motif encoding polynucleotide
  source 1..21: mol_type = other DNA
atcgaaaacgtaaaccacttg

SEQ ID NO: 489 - DNA, 21 bp, synthetic construct
  source 1..21: mol_type = other DNA
  misc_feature 1..21: note = n-mer motif encoding polynucleotide
aggtctctggagagtcaggct

SEQ ID NO: 490 - DNA, 21 bp, synthetic construct
  misc_feature 1..21: note = n-mer motif encoding polynucleotide
  source 1..21: mol_type = other DNA
cagtatacgagtctgagtccg

SEQ ID NO: 491 - DNA, 21 bp, synthetic construct
  misc_feature 1..21: note = n-mer motif encoding polynucleotide
  source 1..21: mol_type = other DNA
acgaagggttataatgatctt

SEQ ID NO: 492 - DNA, 21 bp, synthetic construct
  source 1..21: mol_type = other DNA
  misc_feature 1..21: note = n-mer motif encoding polynucleotide
gtcgcctcgatggtacacaac

SEQ ID NO: 493 - DNA, 21 bp, synthetic construct
  source 1..21: mol_type = other DNA
  misc_feature 1..21: note = n-mer motif encoding polynucleotide
tccacaacccacacctcagca

SEQ ID NO: 494 - DNA, 21 bp, synthetic construct
  source 1..21: mol_type = other DNA
  misc_feature 1..21: note = n-mer motif encoding polynucleotide
cttgcgcacccacaaccaaac

SEQ ID NO: 495 - DNA, 21 bp, synthetic construct
  source 1..21: mol_type = other DNA
  misc_feature 1..21: note = n-mer motif encoding polynucleotide
tcgataaacaacataggcgca

SEQ ID NO: 496 - DNA, 21 bp, synthetic construct
  misc_feature 1..21: note = n-mer motif encoding polynucleotide
  source 1..21: mol_type = other DNA
gctatagactccatcaaaatg

SEQ ID NO: 497 - DNA, 21 bp, synthetic construct
  misc_feature 1..21: note = n-mer motif encoding polynucleotide
  source 1..21: mol_type = other DNA
tctatgtatgggcaggctggg

SEQ ID NO: 498 - DNA, 21 bp, synthetic construct
  source 1..21: mol_type = other DNA
  misc_feature 1..21: note = n-mer motif encoding polynucleotide
gagtatgctaatgctaagact

SEQ ID NO: 499 - DNA, 21 bp, synthetic construct
  source 1..21: mol_type = other DNA
  misc_feature 1..21: note = n-mer motif encoding polynucleotide
tatcgggcttcggatgtggcg

SEQ ID NO: 500 - DNA, 21 bp, synthetic construct
  misc_feature 1..21: note = n-mer motif encoding polynucleotide
  source 1..21: mol_type = other DNA
gttagtttggagagtcggttg

SEQ ID NO: 501 - DNA, 21 bp, synthetic construct
  source 1..21: mol_type = other DNA
  misc_feature 1..21: note = n-mer motif encoding polynucleotide
attgagactagttcgcgttcg

SEQ ID NO: 502 - DNA, 21 bp, synthetic construct
  source 1..21: mol_type = other DNA
  misc_feature 1..21: note = n-mer motif encoding polynucleotide
atgggagtgaaacccgaacaa

SEQ ID NO: 503 - DNA, 21 bp, synthetic construct
  misc_feature 1..21: note = n-mer motif encoding polynucleotide
  source 1..21: mol_type = other DNA
gcgcttccgtctcgtgagcgg

SEQ ID NO: 504 - DNA, 21 bp, synthetic construct
  source 1..21: mol_type = other DNA
  misc_feature 1..21: note = n-mer motif encoding polynucleotide
ggcaccggatcttcagcgcac

SEQ ID NO: 505 - DNA, 21 bp, synthetic construct
  source 1..21: mol_type = other DNA
  misc_feature 1..21: note = n-mer motif encoding polynucleotide
caaacgaacaccaacgacaga

SEQ ID NO: 506 - DNA, 21 bp, synthetic construct
  misc_feature 1..21: note = n-mer motif encoding polynucleotide
  source 1..21: mol_type = other DNA
gtattacactctgtatcagca

SEQ ID NO: 507 - DNA, 21 bp, synthetic construct
  source 1..21: mol_type = other DNA
  misc_feature 1..21: note = n-mer motif encoding polynucleotide
ccttattctgctactgatcgg

SEQ ID NO: 508 - DNA, 21 bp, synthetic construct
  misc_feature 1..21: note = n-mer motif encoding polynucleotide
  source 1..21: mol_type = other DNA
gcaaactccggattacacaac

SEQ ID NO: 509 - DNA, 21 bp, synthetic construct
  source 1..21: mol_type = other DNA
  misc_feature 1..21: note = n-mer motif encoding polynucleotide
tatgagagtactcatgttaat

SEQ ID NO: 510 - DNA, 21 bp, synthetic construct
  misc_feature 1..21: note = n-mer motif encoding polynucleotide
  source 1..21: mol_type = other DNA
aacaacgcactagtaggaagt

SEQ ID NO: 511 - DNA, 21 bp, synthetic construct
  misc_feature 1..21: note = n-mer motif encoding polynucleotide
  source 1..21: mol_type = other DNA
ggtatcaactcctcacacatc

SEQ ID NO: 512 - DNA, 21 bp, synthetic construct
  misc_feature 1..21: note = n-mer motif encoding polynucleotide
  source 1..21: mol_type = other DNA
agtatttctgataagaatcag

SEQ ID NO: 513 - DNA, 21 bp, synthetic construct
  source 1..21: mol_type = other DNA
  misc_feature 1..21: note = n-mer motif encoding polynucleotide
gaccaccaacaagccctagca

SEQ ID NO: 514 - DNA, 21 bp, synthetic construct
  source 1..21: mol_type = other DNA
  misc_feature 1..21: note = n-mer motif encoding polynucleotide
gactctaccaaagccatgcaa

SEQ ID NO: 515 - DNA, 21 bp, synthetic construct
  misc_feature 1..21: note = n-mer motif encoding polynucleotide
  source 1..21: mol_type = other DNA
actattactagtcagtcggtg

SEQ ID NO: 516 - DNA, 21 bp, synthetic construct
  source 1..21: mol_type = other DNA
  misc_feature 1..21: note = n-mer motif encoding polynucleotide
ggcgcccgtacaatcttagac

SEQ ID NO: 517 - DNA, 21 bp, synthetic construct
  misc_feature 1..21: note = n-mer motif encoding polynucleotide
  source 1..21: mol_type = other DNA
gagcatagtcctacgactggt

SEQ ID NO: 518 - DNA, 21 bp, synthetic construct
  misc_feature 1..21: note = n-mer motif encoding polynucleotide
  source 1..21: mol_type = other DNA
gggctcacaggatacccaatg

SEQ ID NO: 519 - DNA, 21 bp, synthetic construct
  misc_feature 1..21: note = n-mer motif encoding polynucleotide
  source 1..21: mol_type = other DNA
acgatggaatccggccgccac

SEQ ID NO: 520 - DNA, 21 bp, synthetic construct
  source 1..21: mol_type = other DNA
  misc_feature 1..21: note = n-mer motif encoding polynucleotide
tctgcgtcgaaagtggaatac

SEQ ID NO: 521 - DNA, 21 bp, synthetic construct
  source 1..21: mol_type = other DNA
  misc_feature 1..21: note = n-mer motif encoding polynucleotide
gataagtctaattatagtatt

SEQ ID NO: 522 - DNA, 21 bp, synthetic construct
  misc_feature 1..21: note = n-mer motif encoding polynucleotide
  source 1..21: mol_type = other DNA
ttcaacgaaactgccgggcga

SEQ ID NO: 523 - DNA, 21 bp, synthetic construct
  source 1..21: mol_type = other DNA
  misc_feature 1..21: note = n-mer motif encoding polynucleotide
caaaaatcggaaacctacact

SEQ ID NO: 524 - DNA, 21 bp, synthetic construct
  source 1..21: mol_type = other DNA
  misc_feature 1..21: note = n-mer motif encoding polynucleotide
gcacttacccgtatgcctaac

SEQ ID NO: 525 - DNA, 21 bp, synthetic construct
  misc_feature 1..21: note = n-mer motif encoding polynucleotide
  source 1..21: mol_type = other DNA
cgtaacggctccgcccaaagc

SEQ ID NO: 526 - DNA, 21 bp, synthetic construct
  misc_feature 1..21: note = n-mer motif encoding polynucleotide
  source 1..21: mol_type = other DNA
gcgagggatacgcctgggatt

SEQ ID NO: 527 - DNA, 21 bp, synthetic construct
  misc_feature 1..21: note = n-mer motif encoding polynucleotide
  source 1..21: mol_type = other DNA
attgttaatgctgagatttat

SEQ ID NO: 528 - DNA, 21 bp, synthetic construct
  source 1..21: mol_type = other DNA
  misc_feature 1..21: note = n-mer motif encoding polynucleotide
cgacaaggcgacttaaaagaa

SEQ ID NO: 529 - DNA, 21 bp, synthetic construct
  misc_feature 1..21: note = n-mer motif encoding polynucleotide
  source 1..21: mol_type = other DNA
cgaaacaacccatcgcacgac

SEQ ID NO: 530 - DNA, 21 bp, synthetic construct
  misc_feature 1..21: note = n-mer motif encoding polynucleotide
  source 1..21: mol_type = other DNA
ctcgcccacaactacttaagc

SEQ ID NO: 531 - DNA, 21 bp, synthetic construct
  misc_feature 1..21: note = n-mer motif encoding polynucleotide
  source 1..21: mol_type = other DNA
aacacccacaacctacaaatg

SEQ ID NO: 532 - DNA, 21 bp, synthetic construct
  misc_feature 1..21: note = n-mer motif encoding polynucleotide
  source 1..21: mol_type = other DNA
cgaggagaccacagcacacag

SEQ ID NO: 533 - DNA, 21 bp, synthetic construct
  source 1..21: mol_type = other DNA
  misc_feature 1..21: note = n-mer motif encoding polynucleotide
ctccacggagtcagcagtata

SEQ ID NO: 534 - DNA, 21 bp, synthetic construct
  misc_feature 1..21: note = n-mer motif encoding polynucleotide
  source 1..21: mol_type = other DNA
ggtattaatcatgtggcgtct

SEQ ID NO: 535 - DNA, 21 bp, synthetic construct
  misc_feature 1..21: note = n-mer motif encoding polynucleotide
  source 1..21: mol_type = other DNA
actgataagcttcagggtgtg

SEQ ID NO: 536 - DNA, 21 bp, synthetic construct
  source 1..21: mol_type = other DNA
  misc_feature 1..21: note = n-mer motif encoding polynucleotide
ggaacctccatagactacgta

SEQ ID NO: 537 - DNA, 21 bp, synthetic construct
  source 1..21: mol_type = other DNA
  misc_feature 1..21: note = n-mer motif encoding polynucleotide
tcgaacactgccccccccccc

SEQ ID NO: 538 - DNA, 21 bp, synthetic construct
  source 1..21: mol_type = other DNA
  misc_feature 1..21: note = n-mer motif encoding polynucleotide
actgctaagagttatgggcct

SEQ ID NO: 539 - DNA, 21 bp, synthetic construct
  source 1..21: mol_type = other DNA
  misc_feature 1..21: note = n-mer motif encoding polynucleotide
gaccaccaacaagcactagct

SEQ ID NO: 540 - DNA, 21 bp, synthetic construct
  source 1..21: mol_type = other DNA
  misc_feature 1..21: note = n-mer motif encoding polynucleotide
acacaagtagtcgcaagaaca

SEQ ID NO: 541 - DNA, 21 bp, synthetic construct
  source 1..21: mol_type = other DNA
  misc_feature 1..21: note = n-mer motif encoding polynucleotide
agtcctcctagtacgtcgggt

SEQ ID NO: 542 - DNA, 21 bp, synthetic construct
  misc_feature 1..21: note = n-mer motif encoding polynucleotide
  source 1..21: mol_type = other DNA
cctatgcgaacaccaccgtac

SEQ ID NO: 543 - DNA, 21 bp, synthetic construct
  misc_feature 1..21: note = n-mer motif encoding polynucleotide
  source 1..21: mol_type = other DNA
gctgctggtaatactactcgt

SEQ ID NO: 544 - DNA, 21 bp, synthetic construct
  source 1..21: mol_type = other DNA
  misc_feature 1..21: note = n-mer motif encoding polynucleotide
agaggcgactaatccacaccc

SEQ ID NO: 545 - DNA, 21 bp, synthetic construct
  misc_feature 1..21: note = n-mer motif encoding polynucleotide
  source 1..21: mol_type = other DNA
ctagcgaaaactgtcgctatc

SEQ ID NO: 546 - DNA, 21 bp, synthetic construct
  source 1..21: mol_type = other DNA
  misc_feature 1..21: note = n-mer motif encoding polynucleotide
tctaaatctgaaaacctgcaa

SEQ ID NO: 547 - DNA, 21 bp, synthetic construct
  misc_feature 1..21: note = n-mer motif encoding polynucleotide
  source 1..21: mol_type = other DNA
actcagacgtcgtatgctacg

SEQ ID NO: 548 - DNA, 21 bp, synthetic construct
  misc_feature 1..21: note = n-mer motif encoding polynucleotide
  source 1..21: mol_type = other DNA
actggggataggacttcggtg

SEQ ID NO: 549 - DNA, 21 bp, synthetic construct
  misc_feature 1..21: note = n-mer motif encoding polynucleotide
  source 1..21: mol_type = other DNA
atatcgcaaggctcgagcctc

SEQ ID NO: 550 - DNA, 21 bp, synthetic construct
  misc_feature 1..21: note = n-mer motif encoding polynucleotide
  source 1..21: mol_type = other DNA
cttgttcagatggggagtgtg

SEQ ID NO: 551 - DNA, 21 bp, synthetic construct
  source 1..21: mol_type = other DNA
  misc_feature 1..21: note = n-mer motif encoding polynucleotide
ttatccgcaacatctacgatg

SEQ ID NO: 552 - DNA, 21 bp, synthetic construct
  source 1..21: mol_type = other DNA
  misc_feature 1..21: note = n-mer motif encoding polynucleotide
caaaaccacaacgaactaaaa

SEQ ID NO: 553 - DNA, 21 bp, synthetic construct
  misc_feature 1..21: note = n-mer motif encoding polynucleotide
  source 1..21: mol_type = other DNA
cgtggtgcgcctgagcatgcg

SEQ ID NO: 554 - DNA, 21 bp, synthetic construct
  source 1..21: mol_type = other DNA
  misc_feature 1..21: note = n-mer motif encoding polynucleotide
tcttctttcggaaaagacaac

SEQ ID NO: 555 - DNA, 21 bp, synthetic construct
  source 1..21: mol_type = other DNA
  misc_feature 1..21: note = n-mer motif encoding polynucleotide
aacgctaacgccggtggaaac

SEQ ID NO: 556 - DNA, 21 bp, synthetic construct
  misc_feature 1..21: note = n-mer motif encoding polynucleotide
  source 1..21: mol_type = other DNA
gatcatcatcctcagagtcgt

SEQ ID NO: 557 - DNA, 21 bp, synthetic construct
  source 1..21: mol_type = other DNA
  misc_feature 1..21: note = n-mer motif encoding polynucleotide
atgaggcatgaggctcctctt

SEQ ID NO: 558 - DNA, 21 bp, synthetic construct
  misc_feature 1..21: note = n-mer motif encoding polynucleotide
  source 1..21: mol_type = other DNA
aagggggatggtgcttatgag

SEQ ID NO: 559 - DNA, 21 bp, synthetic construct
  source 1..21: mol_type = other DNA
  misc_feature 1..21: note = n-mer motif encoding polynucleotide
cctatgaatggtattctgttg

SEQ ID NO: 560 - DNA, 21 bp, synthetic construct
  source 1..21: mol_type = other DNA
  misc_feature 1..21: note = n-mer motif encoding polynucleotide
agtagtgggggtatgaaggcg

SEQ ID NO: 561 - DNA, 21 bp, synthetic construct
  misc_feature 1..21: note = n-mer motif encoding polynucleotide
  source 1..21: mol_type = other DNA
gtgctggttactcagaatcat

SEQ ID NO: 562 - DNA, 21 bp, synthetic construct
  misc_feature 1..21: note = n-mer motif encoding polynucleotide
  source 1..21: mol_type = other DNA
gagattaataatcggactggt

SEQ ID NO: 563 - DNA, 21 bp, synthetic construct
  misc_feature 1..21: note = n-mer motif encoding polynucleotide
  source 1..21: mol_type = other DNA
ttaccaacaggcgtcctgccc

SEQ ID NO: 564 - DNA, 21 bp, synthetic construct
  source 1..21: mol_type = other DNA
  misc_feature 1..21: note = n-mer motif encoding polynucleotide
gcctacggtatcagagaagtg

SEQ ID NO: 565 - DNA, 21 bp, synthetic construct
  misc_feature 1..21: note = n-mer motif encoding polynucleotide
  source 1..21: mol_type = other DNA
tcgacaaactctataggcgcc

SEQ ID NO: 566 - DNA, 21 bp, synthetic construct
  misc_feature 1..21: note = n-mer motif encoding polynucleotide
  source 1..21: mol_type = other DNA
gtgcagttgacgcataatggg

SEQ ID NO: 567 - DNA, 21 bp, synthetic construct
  source 1..21: mol_type = other DNA
  misc_feature 1..21: note = n-mer motif encoding polynucleotide
gttcagttggagaatgcgaat

SEQ ID NO: 568 - DNA, 21 bp, synthetic construct
  misc_feature 1..21: note = n-mer motif encoding polynucleotide
  source 1..21: mol_type = other DNA
ggaaaagccaacgacggttct

SEQ ID NO: 569 - DNA, 21 bp, synthetic construct
  source 1..21: mol_type = other DNA
  misc_feature 1..21: note = n-mer motif encoding polynucleotide
accggggttcgagaaaccata

SEQ ID NO: 570 - DNA, 21 bp, synthetic construct
  source 1..21: mol_type = other DNA
  misc_feature 1..21: note = n-mer motif encoding polynucleotide
ggcctgaaccagatcacatcg

SEQ ID NO: 571 - DNA, 21 bp, synthetic construct
  misc_feature 1..21: note = n-mer motif encoding polynucleotide
  source 1..21: mol_type = other DNA
acggagaaggcgagtcctctg

SEQ ID NO: 572 - DNA, 21 bp, synthetic construct
  source 1..21: mol_type = other DNA
  misc_feature 1..21: note = n-mer motif encoding polynucleotide
tttctggagggtgttgcgcag

SEQ ID NO: 573 - DNA, 21 bp, synthetic construct
  misc_feature 1..21: note = n-mer motif encoding polynucleotide
  source 1..21: mol_type = other DNA
acgaattataatattggtccg

SEQ ID NO: 574 - DNA, 21 bp, synthetic construct
  source 1..21: mol_type = other DNA
  misc_feature 1..21: note = n-mer motif encoding polynucleotide
agaggagacttgacaaccaca

SEQ ID NO: 575 - DNA, 21 bp, synthetic construct
  source 1..21: mol_type = other DNA
  misc_feature 1..21: note = n-mer motif encoding polynucleotide
atgatgaatgtgagtggtcat

SEQ ID NO: 576 - DNA, 21 bp, synthetic construct
  source 1..21: mol_type = other DNA
  misc_feature 1..21: note = n-mer motif encoding polynucleotide
tctcagtcgattaatgggctt

SEQ ID NO: 577 - DNA, 21 bp, synthetic construct
  source 1..21: mol_type = other DNA
  misc_feature 1..21: note = n-mer motif encoding polynucleotide
ctcacgactttaactaaccac

SEQ ID NO: 578 - DNA, 21 bp, synthetic construct
  misc_feature 1..21: note = n-mer motif encoding polynucleotide
  source 1..21: mol_type = other DNA
aactctgttcaatccacccca

SEQ ID NO: 579 - DNA, 21 bp, synthetic construct
  source 1..21: mol_type = other DNA
  misc_feature 1..21: note = n-mer motif encoding polynucleotide
tataatacggatcggactaat

SEQ ID NO: 580 - DNA, 21 bp, synthetic construct
  misc_feature 1..21: note = n-mer motif encoding polynucleotide
  source 1..21: mol_type = other DNA
gagaagcctcagcataatagt

SEQ ID NO: 581 - DNA, 21 bp, synthetic construct
  misc_feature 1..21: note = n-mer motif encoding polynucleotide
  source 1..21: mol_type = other DNA
acgatggctacaaacttaagt

SEQ ID NO: 582 - DNA, 21 bp, synthetic construct
  source 1..21: mol_type = other DNA
  misc_feature 1..21: note = n-mer motif encoding polynucleotide
gtggggacgcatttgcattcg

SEQ ID NO: 583 - DNA, 21 bp, synthetic construct
  misc_feature 1..21: note = n-mer motif encoding polynucleotide
  source 1..21: mol_type = other DNA
gacgcccaccactcaagcagc

SEQ ID NO: 584 - DNA, 21 bp, synthetic construct
  misc_feature 1..21: note = n-mer motif encoding polynucleotide
  source 1..21: mol_type = other DNA
cttgtggggactttggtgtat

SEQ ID NO: 585 - DNA, 21 bp, synthetic construct
  source 1..21: mol_type = other DNA
  misc_feature 1..21: note = n-mer motif encoding polynucleotide
tatggtgtgcaggcgaatagt

SEQ ID NO: 586 - DNA, 21 bp, synthetic construct
  source 1..21: mol_type = other DNA
  misc_feature 1..21: note = n-mer motif encoding polynucleotide
gttttgtctgataaggcgtat

SEQ ID NO: 587 - DNA, 21 bp, synthetic construct
  source 1..21: mol_type = other DNA
  misc_feature 1..21: note = n-mer motif encoding polynucleotide
cttgagggtcagaataagacg

SEQ ID NO: 588 - DNA, 21 bp, synthetic construct
  misc_feature 1..21: note = n-mer motif encoding polynucleotide
  source 1..21: mol_type = other DNA
gaggttagtaataataattat

SEQ ID NO: 589 - DNA, 21 bp, synthetic construct
  source 1..21: mol_type = other DNA
  misc_feature 1..21: note = n-mer motif encoding polynucleotide
gcccaccaacaagccctagct

SEQ ID NO: 590 - DNA, 21 bp, synthetic construct
  misc_feature 1..21: note = n-mer motif encoding polynucleotide
  source 1..21: mol_type = other DNA
cttccgaccacactcaaccac

SEQ ID NO: 591 - DNA, 21 bp, synthetic construct
  misc_feature 1..21: note = n-mer motif encoding polynucleotide
  source 1..21: mol_type = other DNA
tacatagcaggtggtgaacaa

SEQ ID NO: 592 - DNA, 21 bp, synthetic construct
  source 1..21: mol_type = other DNA
  misc_feature 1..21: note = n-mer motif encoding polynucleotide
aattctggtactctttatcag

SEQ ID NO: 593 - DNA, 21 bp, synthetic construct
  source 1..21: mol_type = other DNA
  misc_feature 1..21: note = n-mer motif encoding polynucleotide
cggggtctgcctgatgttaat

SEQ ID NO: 594 - DNA, 21 bp, synthetic construct
  source 1..21: mol_type = other DNA
  misc_feature 1..21: note = n-mer motif encoding polynucleotide
aaccaacaactatcccactca

SEQ ID NO: 595 - DNA, 21 bp, synthetic construct
  source 1..21: mol_type = other DNA
  misc_feature 1..21: note = n-mer motif encoding polynucleotide
aatcctagttatgatcatcgg

SEQ ID NO: 596 - DNA, 21 bp, synthetic construct
  source 1..21: mol_type = other DNA
  misc_feature 1..21: note = n-mer motif encoding polynucleotide
atagacagcgacaccttcgta

SEQ ID NO: 597 - DNA, 21 bp, synthetic construct
  source 1..21: mol_type = other DNA
  misc_feature 1..21: note = n-mer motif encoding polynucleotide
accgcttaccttgcgggatta

SEQ ID NO: 598 - DNA, 21 bp, synthetic construct
  source 1..21: mol_type = other DNA
  misc_feature 1..21: note = n-mer motif encoding polynucleotide
catagtaatgttagtcttgag

SEQ ID NO: 599 - DNA, 21 bp, synthetic construct
  source 1..21: mol_type = other DNA
  misc_feature 1..21: note = n-mer motif encoding polynucleotide
ggtaataatttgagtttgtct

SEQ ID NO: 600 - DNA, 21 bp, synthetic construct
  misc_feature 1..21: note = n-mer motif encoding polynucleotide
  source 1..21: mol_type = other DNA
gttatggatacgcatgggatg

SEQ ID NO: 601 - DNA, 21 bp, synthetic construct
  misc_feature 1..21: note = n-mer motif encoding polynucleotide
  source 1..21: mol_type = other DNA
gcgtataatatgtcgtctgtt

SEQ ID NO: 602 - DNA, 21 bp, synthetic construct
  misc_feature 1..21: note = n-mer motif encoding polynucleotide
  source 1..21: mol_type = other DNA
actaacgccatctctcaaacg

SEQ ID NO: 603 - DNA, 21 bp, synthetic construct
  source 1..21: mol_type = other DNA
  misc_feature 1..21: note = n-mer motif encoding polynucleotide
gcaacacacgccatgcgccca

SEQ ID NO: 604 - DNA, 21 bp, synthetic construct
  source 1..21: mol_type = other DNA
  misc_feature 1..21: note = n-mer motif encoding polynucleotide
atgttaaacaacacaatgatg

SEQ ID NO: 605 - DNA, 21 bp, synthetic construct
  misc_feature 1..21: note = n-mer motif encoding polynucleotide
  source 1..21: mol_type = other DNA
attagttcggggattttgtcg

SEQ ID NO: 606 - DNA, 21 bp, synthetic construct
  misc_feature 1..21: note = n-mer motif encoding polynucleotide
  source 1..21: mol_type = other DNA
cgccaaggcagcttgatgata

SEQ ID NO: 607 - DNA, 21 bp, synthetic construct
  source 1..21: mol_type = other DNA
  misc_feature 1..21: note = n-mer motif encoding polynucleotide
acgactgataagggtattaat

SEQ ID NO: 608 - DNA, 21 bp, synthetic construct
  source 1..21: mol_type = other DNA
  misc_feature 1..21: note = n-mer motif encoding polynucleotide
cacaacttaatgacccaaata

SEQ ID NO: 609 - DNA, 21 bp, synthetic construct
  source 1..21: mol_type = other DNA
  misc_feature 1..21: note = n-mer motif encoding polynucleotide
aaccaaaacacctacgaactg

SEQ ID NO: 610 - DNA, 21 bp, synthetic construct
  source 1..21: mol_type = other DNA
  misc_feature 1..21: note = n-mer motif encoding polynucleotide
gctaacaccgtcacagaacga

SEQ ID NO: 611 - DNA, 21 bp, synthetic construct
  source 1..21: mol_type = other DNA
  misc_feature 1..21: note = n-mer motif encoding polynucleotide
tctacgctgcagactaatggt

SEQ ID NO: 612 - DNA, 21 bp, synthetic construct
  source 1..21: mol_type = other DNA
  misc_feature 1..21: note = n-mer motif encoding polynucleotide
cccaacgaatacaaagcaccg

SEQ ID NO: 613 - DNA, 21 bp, synthetic construct
  misc_feature 1..21: note = n-mer motif encoding polynucleotide
  source 1..21: mol_type = other DNA
atgcaaacacgctcggacaca

SEQ ID NO: 614 - DNA, 21 bp, synthetic construct
  misc_feature 1..21: note = n-mer motif encoding polynucleotide
  source 1..21: mol_type = other DNA
ggaacagggtacgctggatca

SEQ ID NO: 615 - DNA, 21 bp, synthetic construct
  misc_feature 1..21: note = n-mer motif encoding polynucleotide
  source 1..21: mol_type = other DNA
atgggtatgcagaatacgcat

SEQ ID NO: 616 - DNA, 21 bp, synthetic construct
  source 1..21: mol_type = other DNA
  misc_feature 1..21: note = n-mer motif encoding polynucleotide
tctagtaaggagcgtacatcg

SEQ ID NO: 617 - DNA, 21 bp, synthetic construct
  misc_feature 1..21: note = n-mer motif encoding polynucleotide
  source 1..21: mol_type = other DNA
cgaacggacaccccctacacc

SEQ ID NO: 618 - DNA, 21 bp, synthetic construct
  misc_feature 1..21: note = n-mer motif encoding polynucleotide
  source 1..21: mol_type = other DNA
actgcgctgcgggataataag

SEQ ID NO: 619 - DNA, 21 bp, synthetic construct
  misc_feature 1..21: note = n-mer motif encoding polynucleotide
  source 1..21: mol_type = other DNA
aggatgtctgagagttcggat

SEQ ID NO: 620 - DNA, 21 bp, synthetic construct
  misc_feature 1..21: note = n-mer motif encoding polynucleotide
  source 1..21: mol_type = other DNA
aaccaatctataagcatggac

SEQ ID NO: 621 - DNA, 21 bp, synthetic construct
  misc_feature 1..21: note = n-mer motif encoding polynucleotide
  source 1..21: mol_type = other DNA
tcgcttgggcatagtaataat

SEQ ID NO: 622 - DNA, 21 bp, synthetic construct
  source 1..21: mol_type = other DNA
  misc_feature 1..21: note = n-mer motif encoding polynucleotide
cttaatagtggtggtgcgatg

SEQ ID NO: 623 - DNA, 21 bp, synthetic construct
  misc_feature 1..21: note = n-mer motif encoding polynucleotide
  source 1..21: mol_type = other DNA
aacgaacaattcgaaaaagtc

SEQ ID NO: 624 - DNA, 21 bp, synthetic construct
  source 1..21: mol_type = other DNA
  misc_feature 1..21: note = n-mer motif encoding polynucleotide
atgatggcgaataatatgcag

SEQ ID NO: 625 - DNA, 21 bp, synthetic construct
  source 1..21: mol_type = other DNA
  misc_feature 1..21: note = n-mer motif encoding polynucleotide
agtcggcgcgaagaacaacca

SEQ ID NO: 626 - DNA, 21 bp, synthetic construct
  misc_feature 1..21: note = n-mer motif encoding polynucleotide
  source 1..21: mol_type = other DNA
gcgactatgacttcgtcgacg

SEQ ID NO: 627 - DNA, 21 bp, synthetic construct
  source 1..21: mol_type = other DNA
  misc_feature 1..21: note = n-mer motif encoding polynucleotide
cgtggttcagacggaggattg

SEQ ID NO: 628 - DNA, 21 bp, synthetic construct
  misc_feature 1..21: note = n-mer motif encoding polynucleotide
  source 1..21: mol_type = other DNA
agtttgacgcctaataatctt

SEQ ID NO: 629 - DNA, 21 bp, synthetic construct
  source 1..21: mol_type = other DNA
  misc_feature 1..21: note = n-mer motif encoding polynucleotide
gctactctttctccgcatgct

SEQ ID NO: 630 - DNA, 21 bp, synthetic construct
  misc_feature 1..21: note = n-mer motif encoding polynucleotide
  source 1..21: mol_type = other DNA
tatctgcaggagaagtttcct

SEQ ID NO: 631 - DNA, 21 bp, synthetic construct
  misc_feature 1..21: note = n-mer motif encoding polynucleotide
  source 1..21: mol_type = other DNA
ggcaccgggtacccaaaccaa

SEQ ID NO: 632 - DNA, 21 bp, synthetic construct
  misc_feature 1..21: note = n-mer motif encoding polynucleotide
  source 1..21: mol_type = other DNA
aattatccttcggttcaggag

SEQ ID NO: 633 - DNA, 21 bp, synthetic construct
  source 1..21: mol_type = other DNA
  misc_feature 1..21: note = n-mer motif encoding polynucleotide
actgacgcatcgggtagatca

SEQ ID NO: 634 - DNA, 21 bp, synthetic construct
  misc_feature 1..21: note = n-mer motif encoding polynucleotide
  source 1..21: mol_type = other DNA
cgtgtgattactgcgggtgat

SEQ ID NO: 635 - DNA, 21 bp, synthetic construct
  misc_feature 1..21: note = n-mer motif encoding polynucleotide
  source 1..21: mol_type = other DNA
gtgactgtgagtaatagtctg

SEQ ID NO: 636 - DNA, 21 bp, synthetic construct
  misc_feature 1..21: note = n-mer motif encoding polynucleotide
  source 1..21: mol_type = other DNA
ttgttgacggctccgcatagg

SEQ ID NO: 637 - DNA, 21 bp, synthetic construct
  source 1..21: mol_type = other DNA
  misc_feature 1..21: note = n-mer motif encoding polynucleotide
tcaatcgcaaaccacatgata

SEQ ID NO: 638 - DNA, 21 bp, synthetic construct
  misc_feature 1..21: note = n-mer motif encoding polynucleotide
  source 1..21: mol_type = other DNA
atgccttcgaaaggcgaagta

SEQ ID NO: 639 - DNA, 21 bp, synthetic construct
  source 1..21: mol_type = other DNA
  misc_feature 1..21: note = n-mer motif encoding polynucleotide
aacatgaccaacgaacggctc

SEQ ID NO: 640 - DNA, 21 bp, synthetic construct
  misc_feature 1..21: note = n-mer motif encoding polynucleotide
  source 1..21: mol_type = other DNA
tcattctcttcaggcataatg

SEQ ID NO: 641 - DNA, 21 bp, synthetic construct
  misc_feature 1..21: note = n-mer motif encoding polynucleotide
  source 1..21: mol_type = other DNA
cgcgaccgtcaagactcggta

SEQ ID NO: 642 - DNA, 21 bp, synthetic construct
  source 1..21: mol_type = other DNA
  misc_feature 1..21: note = n-mer motif encoding polynucleotide
cacggtgaccgaacagcttta

SEQ ID NO: 643 - DNA, 21 bp, synthetic construct
  misc_feature 1..21: note = n-mer motif encoding polynucleotide
  source 1..21: mol_type = other DNA
gaagtacggggcagcgtgcca

SEQ ID NO: 644 - DNA, 21 bp, synthetic construct
  misc_feature 1..21: note = n-mer motif encoding polynucleotide
  source 1..21: mol_type = other DNA
ctgatttcgactggtaataat

SEQ ID NO: 645 - DNA, 21 bp, synthetic construct
  misc_feature 1..21: note = n-mer motif encoding polynucleotide
  source 1..21: mol_type = other DNA
ccaacatctggggacaaaccg

SEQ ID NO: 646 - DNA, 21 bp, synthetic construct
  source 1..21: mol_type = other DNA
  misc_feature 1..21: note = n-mer motif encoding polynucleotide
aaagcggaccacagtggggca

SEQ ID NO: 647 - DNA, 21 bp, synthetic construct
  source 1..21: mol_type = other DNA
  misc_feature 1..21: note = n-mer motif encoding polynucleotide
ctaaacgacgtctaccgtaaa

SEQ ID NO: 648 - DNA, 21 bp, synthetic construct
  source 1..21: mol_type = other DNA
  misc_feature 1..21: note = n-mer motif encoding polynucleotide
aacagtttgcaagcaagtgca

SEQ ID NO: 649 - DNA, 21 bp, synthetic construct
  misc_feature 1..21: note = n-mer motif encoding polynucleotide
  source 1..21: mol_type = other DNA
tatcataatgagattatgacg

SEQ ID NO: 650 - DNA, 21 bp, synthetic construct
  source 1..21: mol_type = other DNA
  misc_feature 1..21: note = n-mer motif encoding polynucleotide
aacaacaccctaaacatccta

SEQ ID NO: 651 - DNA, 21 bp, synthetic construct
  misc_feature 1..21: note = n-mer motif encoding polynucleotide
  source 1..21: mol_type = other DNA
tcttatgggcagggtctggag

SEQ ID NO: 652 - DNA, 21 bp, synthetic construct
  source 1..21: mol_type = other DNA
  misc_feature 1..21: note = n-mer motif encoding polynucleotide
atgataaaaaccaacatgttg

SEQ ID NO: 653 - DNA, 21 bp, synthetic construct
  misc_feature 1..21: note = n-mer motif encoding polynucleotide
  source 1..21: mol_type = other DNA
accgaagcgggccgcccccaa

SEQ ID NO: 654 - DNA, 21 bp, synthetic construct
  misc_feature 1..21: note = n-mer motif encoding polynucleotide
  source 1..21: mol_type = other DNA
aggattgatcagactaatgtg

SEQ ID NO: 655 - DNA, 21 bp, synthetic construct
  source 1..21: mol_type = other DNA
  misc_feature 1..21: note = n-mer motif encoding polynucleotide
gaggggcataatcgtggtatt

SEQ ID NO: 656 - DNA, 21 bp, synthetic construct
  misc_feature 1..21: note = n-mer motif encoding polynucleotide
  source 1..21: mol_type = other DNA
atggggactgagtatcgtatg

SEQ ID NO: 657 - DNA, 21 bp, synthetic construct
  source 1..21: mol_type = other DNA
  misc_feature 1..21: note = n-mer motif encoding polynucleotide
tcgggtatgaatagtaataag

SEQ ID NO: 658 - DNA, 21 bp, synthetic construct
  source 1..21: mol_type = other DNA
  misc_feature 1..21: note = n-mer motif encoding polynucleotide
ttgactaatgataataagttg

SEQ ID NO: 659 - DNA, 21 bp, synthetic construct
  misc_feature 1..21: note = n-mer motif encoding polynucleotide
  source 1..21: mol_type = other DNA
ttacacaactaccaagaccgt

SEQ ID NO: 660 - DNA, 21 bp, synthetic construct
  source 1..21: mol_type = other DNA
  misc_feature 1..21: note = n-mer motif encoding polynucleotide
aagtctaatttggagggtaag

SEQ ID NO: 661 - DNA, 21 bp, synthetic construct
  source 1..21: mol_type = other DNA
  misc_feature 1..21: note = n-mer motif encoding polynucleotide
cttactggtcagaatgcgatt

SEQ ID NO: 662 - DNA, 21 bp, synthetic construct
  misc_feature 1..21: note = n-mer motif encoding polynucleotide
  source 1..21: mol_type = other DNA
catactgtgggggctatgcat

SEQ ID NO: 663 - DNA, 21 bp, synthetic construct
  source 1..21: mol_type = other DNA
  misc_feature 1..21: note = n-mer motif encoding polynucleotide
ctccaactggctacatcccac

SEQ ID NO: 664 - DNA, 21 bp, synthetic construct
  source 1..21: mol_type = other DNA
  misc_feature 1..21: note = n-mer motif encoding polynucleotide
agtctgaatggggtgttggtt

SEQ ID NO: 665 - DNA, 21 bp, synthetic construct
  source 1..21: mol_type = other DNA
  misc_feature 1..21: note = n-mer motif encoding polynucleotide
agtcacaaccaagtaaacgta

SEQ ID NO: 666 - DNA, 21 bp, synthetic construct
  source 1..21: mol_type = other DNA
  misc_feature 1..21: note = n-mer motif encoding polynucleotide
agtttgagtactgatgtgttt

SEQ ID NO: 667 - DNA, 21 bp, synthetic construct
  source 1..21: mol_type = other DNA
  misc_feature 1..21: note = n-mer motif encoding polynucleotide
atggtaggtcgtgccgaaatc

SEQ ID NO: 668 - DNA, 21 bp, synthetic construct
  misc_feature 1..21: note = n-mer motif encoding polynucleotide
  source 1..21: mol_type = other DNA
ttgtctagtatgagtacggat

SEQ ID NO: 669 - DNA, 21 bp, synthetic construct
  misc_feature 1..21: note = n-mer motif encoding polynucleotide
  source 1..21: mol_type = other DNA
tcctacagtacttcaacaccg

SEQ ID NO: 670 - DNA, 21 bp, synthetic construct
  source 1..21: mol_type = other DNA
  misc_feature 1..21: note = n-mer motif encoding polynucleotide
tccgaattaatggtcagaccc

SEQ ID NO: 671 - DNA, 21 bp, synthetic construct
  misc_feature 1..21: note = n-mer motif encoding polynucleotide
  source 1..21: mol_type = other DNA
tggaacggaaacgccacacaa

SEQ ID NO: 672 - DNA, 21 bp, synthetic construct
  source 1..21: mol_type = other DNA
  misc_feature 1..21: note = n-mer motif encoding polynucleotide
atggatactgagctttatagg

SEQ ID NO: 673 - DNA, 21 bp, synthetic construct
  source 1..21: mol_type = other DNA
  misc_feature 1..21: note = n-mer motif encoding polynucleotide
aggacgagtcctgatacgaat

SEQ ID NO: 674 - DNA, 21 bp, synthetic construct
  source 1..21: mol_type = other DNA
  misc_feature 1..21: note = n-mer motif encoding polynucleotide
ttctcaacgcaagacataagc

SEQ ID NO: 675 - DNA, 21 bp, synthetic construct
  source 1..21: mol_type = other DNA
  misc_feature 1..21: note = n-mer motif encoding polynucleotide
acgactgtgctggggaataat

SEQ ID NO: 676 - DNA, 21 bp, synthetic construct
  source 1..21: mol_type = other DNA
  misc_feature 1..21: note = n-mer motif encoding polynucleotide
cagcgtgatgctgcgtatgct

SEQ ID NO: 677 - DNA, 21 bp, synthetic construct
  source 1..21: mol_type = other DNA
  misc_feature 1..21: note = n-mer motif encoding polynucleotide
caccaaaccgtggtccctact

SEQ ID NO: 678 - DNA, 21 bp, synthetic construct
  source 1..21: mol_type = other DNA
  misc_feature 1..21: note = n-mer motif encoding polynucleotide
tctaatccgggtaatcataat

SEQ ID NO: 679 - DNA, 21 bp, synthetic construct
  misc_feature 1..21: note = n-mer motif encoding polynucleotide
  source 1..21: mol_type = other DNA
tgggagactatggctaagcct

SEQ ID NO: 680 - DNA, 21 bp, synthetic construct
  misc_feature 1..21: note = n-mer motif encoding polynucleotide
  source 1..21: mol_type = other DNA
ggtctttatcagaatcctacg

SEQ ID NO: 681 - DNA, 21 bp, synthetic construct
  source 1..21: mol_type = other DNA
  misc_feature 1..21: note = n-mer motif encoding polynucleotide
cttaatcttactaatcataat

SEQ ID NO: 682 - DNA, 21 bp, synthetic construct
  source 1..21: mol_type = other DNA
  misc_feature 1..21: note = n-mer motif encoding polynucleotide
atgagtctcgcctccacccaa

SEQ ID NO: 683 - DNA, 21 bp, synthetic construct
  misc_feature 1..21: note = n-mer motif encoding polynucleotide
  source 1..21: mol_type = other DNA
acgtcccaaaccgtccgagta

SEQ ID NO: 684 - DNA, 21 bp, synthetic construct
  source 1..21: mol_type = other DNA
  misc_feature 1..21: note = n-mer motif encoding polynucleotide
ggagcaacggtcaacacgcga

SEQ ID NO: 685 - DNA, 21 bp, synthetic construct
  source 1..21: mol_type = other DNA
  misc_feature 1..21: note = n-mer motif encoding polynucleotide
aaagggggaaacctcaccgca

SEQ ID NO: 686 - DNA, 21 bp, synthetic construct
  misc_feature 1..21: note = n-mer motif encoding polynucleotide
  source 1..21: mol_type = other DNA
gcgtggtctcaagtcctgacg

SEQ ID NO: 687 - DNA, 21 bp, synthetic construct
  source 1..21: mol_type = other DNA
  misc_feature 1..21: note = n-mer motif encoding polynucleotide
gtagaacacgtagcccaccaa

SEQ ID NO: 688 - DNA, 21 bp, synthetic construct
  misc_feature 1..21: note = n-mer motif encoding polynucleotide
  source 1..21: mol_type = other DNA
ctaatgtcgtcctactcatca

SEQ ID NO: 689 - DNA, 21 bp, synthetic construct
  source 1..21: mol_type = other DNA
  misc_feature 1..21: note = n-mer motif encoding polynucleotide
tctctgggtgggaatccgcct

SEQ ID NO: 690 - DNA, 21 bp, synthetic construct
  source 1..21: mol_type = other DNA
  misc_feature 1..21: note = n-mer motif encoding polynucleotide
aagaatgagaatacgaattat

SEQ ID NO: 691 - DNA, 21 bp, synthetic construct
  source 1..21: mol_type = other DNA
  misc_feature 1..21: note = n-mer motif encoding polynucleotide
atattggacaaccaccgtttc

SEQ ID NO: 692 - DNA, 21 bp, synthetic construct
  misc_feature 1..21: note = n-mer motif encoding polynucleotide
  source 1..21: mol_type = other DNA
aattcgtcgcatgttaattct

SEQ ID NO: 693 - DNA, 21 bp, synthetic construct
  source 1..21: mol_type = other DNA
  misc_feature 1..21: note = n-mer motif encoding polynucleotide
caggtgcagcatgagagggtg

SEQ ID NO: 694 - DNA, 21 bp, synthetic construct
  misc_feature 1..21: note = n-mer motif encoding polynucleotide
  source 1..21: mol_type = other DNA
ttgggaggaaccctgggaata

SEQ ID NO: 695 - DNA, 21 bp, synthetic construct
  misc_feature 1..21: note = n-mer motif encoding polynucleotide
  source 1..21: mol_type = other DNA
actcaagaacgaccactaatc

SEQ ID NO: 696 - DNA, 21 bp, synthetic construct
  source 1..21: mol_type = other DNA
  misc_feature 1..21: note = n-mer motif encoding polynucleotide
cgtaagactgaggataggatg

SEQ ID NO: 697 - DNA, 21 bp, synthetic construct
  source 1..21: mol_type = other DNA
  misc_feature 1..21: note = n-mer motif encoding polynucleotide
accgaactcacagcgcggaac

SEQ ID NO: 698 - DNA, 21 bp, synthetic construct
  source 1..21: mol_type = other DNA
  misc_feature 1..21: note = n-mer motif encoding polynucleotide
cgcggcgacaacacttactcc

SEQ ID NO: 699 - DNA, 21 bp, synthetic construct
  misc_feature 1..21: note = n-mer motif encoding polynucleotide
  source 1..21: mol_type = other DNA
cagtctaatactaataatagt

SEQ ID NO: 700 - DNA, 21 bp, synthetic construct
  misc_feature 1..21: note = n-mer motif encoding polynucleotide
  source 1..21: mol_type = other DNA
gcttcttatagtatttctgat

SEQ ID NO: 701 - DNA, 21 bp, synthetic construct
  source 1..21: mol_type = other DNA
  misc_feature 1..21: note = n-mer motif encoding polynucleotide
agcgaacaccacgccggaata

SEQ ID NO: 702 - DNA, 21 bp, synthetic construct
  misc_feature 1..21: note = n-mer motif encoding polynucleotide
  source 1..21: mol_type = other DNA
cgtggtgcgccagagcatgcg

SEQ ID NO: 703 - DNA, 21 bp, synthetic construct
  source 1..21: mol_type = other DNA
  misc_feature 1..21: note = n-mer motif encoding polynucleotide
aattttagtagtggtgatgtt

SEQ ID NO: 704 - DNA, 21 bp, synthetic construct
  misc_feature 1..21: note = n-mer motif encoding polynucleotide
  source 1..21: mol_type = other DNA
agtggcatcaacgccaccgac

SEQ ID NO: 705 - DNA, 21 bp, synthetic construct
  source 1..21: mol_type = other DNA
  misc_feature 1..21: note = n-mer motif encoding polynucleotide
cgggctgatgtttcttggtct

SEQ ID NO: 706 - DNA, 21 bp, synthetic construct
  misc_feature 1..21: note = n-mer motif encoding polynucleotide
  source 1..21: mol_type = other DNA
tgtatggatgttggtaaggcg

SEQ ID NO: 707 - DNA, 21 bp, synthetic construct
  source 1..21: mol_type = other DNA
  misc_feature 1..21: note = n-mer motif encoding polynucleotide
ggggtcggagccacttcggta

SEQ ID NO: 708 - DNA, 21 bp, synthetic construct
  source 1..21: mol_type = other DNA
  misc_feature 1..21: note = n-mer motif encoding polynucleotide
aaaaacaacaactcagacagt

SEQ ID NO: 709 - DNA, 21 bp, synthetic construct
  source 1..21: mol_type = other DNA
  misc_feature 1..21: note = n-mer motif encoding polynucleotide
aatgttgcgagtattgatagg

SEQ ID NO: 710 - DNA, 21 bp, synthetic construct
  misc_feature 1..21: note = n-mer motif encoding polynucleotide
  source 1..21: mol_type = other DNA
aatagtgtgaatggtcttctg

SEQ ID NO: 711 - DNA, 21 bp, synthetic construct
  misc_feature 1..21: note = n-mer motif encoding polynucleotide
  source 1..21: mol_type = other DNA
acactagaccgaaaccaaacc

SEQ ID NO: 712 - DNA, 21 bp, synthetic construct
  source 1..21: mol_type = other DNA
  misc_feature 1..21: note = n-mer motif encoding polynucleotide
gaccaaaacttcgaacgtaga

SEQ ID NO: 713 - DNA, 21 bp, synthetic construct
  misc_feature 1..21: note = n-mer motif encoding polynucleotide
  source 1..21: mol_type = other DNA
gtcggtgacaggaacttggtc

SEQ ID NO: 714 - DNA, 21 bp, synthetic construct
  misc_feature 1..21: note = n-mer motif encoding polynucleotide
  source 1..21: mol_type = other DNA
ttagaagtaaacctgcaaacg

SEQ ID NO: 715 - DNA, 21 bp, synthetic construct
  source 1..21: mol_type = other DNA
  misc_feature 1..21: note = n-mer motif encoding polynucleotide
actaatggggggtcgcttaat

SEQ ID NO: 716 - DNA, 21 bp, synthetic construct
  source 1..21: mol_type = other DNA
  misc_feature 1..21: note = n-mer motif encoding polynucleotide
ttcacgcgcacaccagtaacc

SEQ ID NO: 717 - DNA, 21 bp, synthetic construct
  source 1..21: mol_type = other DNA
  misc_feature 1..21: note = n-mer motif encoding polynucleotide
acaccggcggaaagcaaagtt

SEQ ID NO: 718 - DNA, 21 bp, synthetic construct
  misc_feature 1..21: note = n-mer motif encoding polynucleotide
  source 1..21: mol_type = other DNA
tttccttcgcataatggggcg

SEQ ID NO: 719 - DNA, 21 bp, synthetic construct
  source 1..21: mol_type = other DNA
  misc_feature 1..21: note = n-mer motif encoding polynucleotide
gccaggaacgtaatgctgggg

SEQ ID NO: 720 - DNA, 21 bp, synthetic construct
  source 1..21: mol_type = other DNA
  misc_feature 1..21: note = n-mer motif encoding polynucleotide
acgattcaggatcatattaag

SEQ ID NO: 721 - DNA, 21 bp, synthetic construct
  misc_feature 1..21: note = n-mer motif encoding polynucleotide
  source 1..21: mol_type = other DNA
attaattcgtatttgcatgag

SEQ ID NO: 722 - DNA, 21 bp, synthetic construct
  source 1..21: mol_type = other DNA
  misc_feature 1..21: note = n-mer motif encoding polynucleotide
gcgcatgatgttactgtgaat

SEQ ID NO: 723 - DNA, 21 bp, synthetic construct
  source 1..21: mol_type = other DNA
  misc_feature 1..21: note = n-mer motif encoding polynucleotide
actgtgggggttcagcagacg

SEQ ID NO: 724 - DNA, 21 bp, synthetic construct
  source 1..21: mol_type = other DNA
  misc_feature 1..21: note = n-mer motif encoding polynucleotide
acaggtagttcagacagatta

SEQ ID NO: 725 - DNA, 21 bp, synthetic construct
  misc_feature 1..21: note = n-mer motif encoding polynucleotide
  source 1..21: mol_type = other DNA
aatcatgatactgctcatgct

SEQ ID NO: 726 - DNA, 21 bp, synthetic construct
  misc_feature 1..21: note = n-mer motif encoding polynucleotide
  source 1..21: mol_type = other DNA
gccgaatcccaactagctagc

SEQ ID NO: 727 - DNA, 21 bp, synthetic construct
  source 1..21: mol_type = other DNA
  misc_feature 1..21: note = n-mer motif encoding polynucleotide
ggtaatgcgtataatacgact

SEQ ID NO: 728 - DNA, 21 bp, synthetic construct
  misc_feature 1..21: note = n-mer motif encoding polynucleotide
  source 1..21: mol_type = other DNA
aatcatcaggctggtactact

SEQ ID NO: 729 - DNA, 21 bp, synthetic construct
  misc_feature 1..21: note = n-mer motif encoding polynucleotide
  source 1..21: mol_type = other DNA
acggtaggagaaaaccaccga

SEQ ID NO: 730 - DNA, 21 bp, synthetic construct
  misc_feature 1..21: note = n-mer motif encoding polynucleotide
  source 1..21: mol_type = other DNA
ctaactactaaaatacccctc

SEQ ID NO: 731 - DNA, 21 bp, synthetic construct
  source 1..21: mol_type = other DNA
  misc_feature 1..21: note = n-mer motif encoding polynucleotide
actaattatcctgaggcgaat

SEQ ID NO: 732 - DNA, 21 bp, synthetic construct
  source 1..21: mol_type = other DNA
  misc_feature 1..21: note = n-mer motif encoding polynucleotide
aatactgctccgccgaatcat

SEQ ID NO: 733 - DNA, 21 bp, synthetic construct
  misc_feature 1..21: note = n-mer motif encoding polynucleotide
  source 1..21: mol_type = other DNA
gtgctgagtacggggctgcgg

SEQ ID NO: 734 - DNA, 21 bp, synthetic construct
  misc_feature 1..21: note = n-mer motif encoding polynucleotide
  source 1..21: mol_type = other DNA
ctcacgtcccactctgcgggc

SEQ ID NO: 735 - DNA, 21 bp, synthetic construct
  misc_feature 1..21: note = n-mer motif encoding polynucleotide
  source 1..21: mol_type = other DNA
atgaataagcatggtgtgctt

SEQ ID NO: 736 - DNA, 21 bp, synthetic construct
  source 1..21: mol_type = other DNA
  misc_feature 1..21: note = n-mer motif encoding polynucleotide
gacctgaccagagctgcaata

SEQ ID NO: 737 - DNA, 21 bp, synthetic construct
  source 1..21: mol_type = other DNA
  misc_feature 1..21: note = n-mer motif encoding polynucleotide
tatattgtggatcatgcgaat

SEQ ID NO: 738 - DNA, 21 bp, synthetic construct
  source 1..21: mol_type = other DNA
  misc_feature 1..21: note = n-mer motif encoding polynucleotide
agtgggcctgagaatacgttg

SEQ ID NO: 739 - DNA, 21 bp, synthetic construct
  misc_feature 1..21: note = n-mer motif encoding polynucleotide
  source 1..21: mol_type = other DNA
cgttatggtgatacgggtatg

SEQ ID NO: 740 - DNA, 21 bp, synthetic construct
  misc_feature 1..21: note = n-mer motif encoding polynucleotide
  source 1..21: mol_type = other DNA
gatggtaagaatagttatgcg

SEQ ID NO: 741 - DNA, 21 bp, synthetic construct
  misc_feature 1..21: note = n-mer motif encoding polynucleotide
  source 1..21: mol_type = other DNA
gaggcgcataatcgtgttatt

SEQ ID NO: 742 - DNA, 21 bp, synthetic construct
  misc_feature 1..21: note = n-mer motif encoding polynucleotide
  source 1..21: mol_type = other DNA
agtttgcaggctggtaggatg

SEQ ID NO: 743 - DNA, 21 bp, synthetic construct
  misc_feature 1..21: note = n-mer motif encoding polynucleotide
  source 1..21: mol_type = other DNA
gatgcgaaggctcttacgact

SEQ ID NO: 744 - DNA, 21 bp, synthetic construct
  misc_feature 1..21: note = n-mer motif encoding polynucleotide
  source 1..21: mol_type = other DNA
accgacacccgaaaaaacgac

SEQ ID NO: 745 - DNA, 21 bp, synthetic construct
  misc_feature 1..21: note = n-mer motif encoding polynucleotide
  source 1..21: mol_type = other DNA
gactcttcacactactcgaca

SEQ ID NO: 746 - DNA, 21 bp, synthetic construct
  source 1..21: mol_type = other DNA
  misc_feature 1..21: note = n-mer motif encoding polynucleotide
acaatgcaccttcccaacctg

SEQ ID NO: 747 - DNA, 21 bp, synthetic construct
  misc_feature 1..21: note = n-mer motif encoding polynucleotide
  source 1..21: mol_type = other DNA
cgagacggctctactaaagtt

SEQ ID NO: 748 - DNA, 21 bp, synthetic construct
  misc_feature 1..21: note = n-mer motif encoding polynucleotide
  source 1..21: mol_type = other DNA
tcagggtaccaaatgacagaa

SEQ ID NO: 749 - DNA, 21 bp, synthetic construct
  source 1..21: mol_type = other DNA
  misc_feature 1..21: note = n-mer motif encoding polynucleotide
tgcgacttgtcacaatcatgc

SEQ ID NO: 750 - DNA, 21 bp, synthetic construct
  misc_feature 1..21: note = n-mer motif encoding polynucleotide
  source 1..21: mol_type = other DNA
agaaacgcgtcaaacggcgta

SEQ ID NO: 751 - DNA, 21 bp, synthetic construct
  misc_feature 1..21: note = n-mer motif encoding polynucleotide
  source 1..21: mol_type = other DNA
cagtcgcagaatgtgactcag

SEQ ID NO: 752 - DNA, 21 bp, synthetic construct
  misc_feature 1..21: note = n-mer motif encoding polynucleotide
  source 1..21: mol_type = other DNA
gattctgctccgagtactatt

SEQ ID NO: 753 - DNA, 21 bp, synthetic construct
  source 1..21: mol_type = other DNA
  misc_feature 1..21: note = n-mer motif encoding polynucleotide
aggtccgtaccatcaccacac

SEQ ID NO: 754 - DNA, 21 bp, synthetic construct
  source 1..21: mol_type = other DNA
  misc_feature 1..21: note = n-mer motif encoding polynucleotide
atgacgtctgcgtctcgtggt

SEQ ID NO: 755 - DNA, 21 bp, synthetic construct
  source 1..21: mol_type = other DNA
  misc_feature 1..21: note = n-mer motif encoding polynucleotide
gctcttgctagtcgtcctatg

SEQ ID NO: 756 - DNA, 21 bp, synthetic construct
  source 1..21: mol_type = other DNA
  misc_feature 1..21: note = n-mer motif encoding polynucleotide
ctaaacctctccaacgactgg

SEQ ID NO: 757 - DNA, 21 bp, synthetic construct
  source 1..21: mol_type = other DNA
  misc_feature 1..21: note = n-mer motif encoding polynucleotide
gtttctacggcgcagaggcag

SEQ ID NO: 758 - DNA, 21 bp, synthetic construct
  source 1..21: mol_type = other DNA
  misc_feature 1..21: note = n-mer motif encoding polynucleotide
cacgccgacgttggcatgagc

SEQ ID NO: 759 - DNA, 21 bp, synthetic construct
  source 1..21: mol_type = other DNA
  misc_feature 1..21: note = n-mer motif encoding polynucleotide
gcggggggtttgctgtcgcgg

SEQ ID NO: 760 - DNA, 21 bp, synthetic construct
  source 1..21: mol_type = other DNA
  misc_feature 1..21: note = n-mer motif encoding polynucleotide
catcttagtcaggctaatcat

SEQ ID NO: 761 - DNA, 21 bp, synthetic construct
  source 1..21: mol_type = other DNA
  misc_feature 1..21: note = n-mer motif encoding polynucleotide
gtgcataatcctactactacg

SEQ ID NO: 762 - DNA, 21 bp, synthetic construct
  source 1..21: mol_type = other DNA
  misc_feature 1..21: note = n-mer motif encoding polynucleotide
tctcagcggaatccggatgat

SEQ ID NO: 763 - DNA, 21 bp, synthetic construct
  source 1..21: mol_type = other DNA
  misc_feature 1..21: note = n-mer motif encoding polynucleotide
agggagactaataattttgcg

SEQ ID NO: 764 - DNA, 21 bp, synthetic construct
  misc_feature 1..21: note = n-mer motif encoding polynucleotide
  source 1..21: mol_type = other DNA
aatgcgggggctcttatgggt

SEQ ID NO: 765 - DNA, 21 bp, synthetic construct
  source 1..21: mol_type = other DNA
  misc_feature 1..21: note = n-mer motif encoding polynucleotide
ttgccgaagactgtgaatatg

SEQ ID NO: 766 - DNA, 21 bp, synthetic construct
  source 1..21: mol_type = other DNA
  misc_feature 1..21: note = n-mer motif encoding polynucleotide
gcaagtgacctacaaatgacg

SEQ ID NO: 767 - DNA, 21 bp, synthetic construct
  misc_feature 1..21: note = n-mer motif encoding polynucleotide
  source 1..21: mol_type = other DNA
caagccctggccaccacaaac

SEQ ID NO: 768 - DNA, 21 bp, synthetic construct
  source 1..21: mol_type = other DNA
  misc_feature 1..21: note = n-mer motif encoding polynucleotide
catgagtcgtctggttatcat

SEQ ID NO: 769 - DNA, 21 bp, synthetic construct
  source 1..21: mol_type = other DNA
  misc_feature 1..21: note = n-mer motif encoding polynucleotide
ggggtgaatgatcgtgctagg

SEQ ID NO: 770 - DNA, 21 bp, synthetic construct
  misc_feature 1..21: note = n-mer motif encoding polynucleotide
  source 1..21: mol_type = other DNA
cctcgggatgctcttcgtact

SEQ ID NO: 771 - DNA, 21 bp, synthetic construct
  misc_feature 1..21: note = n-mer motif encoding polynucleotide
  source 1..21: mol_type = other DNA
aacgactcctcgtcaatgtcc

SEQ ID NO: 772 - DNA, 21 bp, synthetic construct
  misc_feature 1..21: note = n-mer motif encoding polynucleotide
  source 1..21: mol_type = other DNA
gaatacaacacgcgccacgac

SEQ ID NO: 773 - DNA, 21 bp, synthetic construct
  misc_feature 1..21: note = n-mer motif encoding polynucleotide
  source 1..21: mol_type = other DNA
gcgtctccggcgcatacgtct

SEQ ID NO: 774 - DNA, 21 bp, synthetic construct
  misc_feature 1..21: note = n-mer motif encoding polynucleotide
  source 1..21: mol_type = other DNA
caaaacagcaacactccctca

SEQ ID NO: 775 - DNA, 21 bp, synthetic construct
  source 1..21: mol_type = other DNA
  misc_feature 1..21: note = n-mer motif encoding polynucleotide
ttggcaaaactagggaactac

SEQ ID NO: 776 - DNA, 21 bp, synthetic construct
  misc_feature 1..21: note = n-mer motif encoding polynucleotide
  source 1..21: mol_type = other DNA
gctagtgataggcagtctggt

SEQ ID NO: 777 - DNA, 21 bp, synthetic construct
  source 1..21: mol_type = other DNA
  misc_feature 1..21: note = n-mer motif encoding polynucleotide
tatcagaatggtgtgcttcct

SEQ ID NO: 778 - DNA, 21 bp, synthetic construct
  misc_feature 1..21: note = n-mer motif encoding polynucleotide
  source 1..21: mol_type = other DNA
aataagtttggttataatcct

SEQ ID NO: 779 - DNA, 21 bp, synthetic construct
  misc_feature 1..21: note = n-mer motif encoding polynucleotide
  source 1..21: mol_type = other DNA
aaaaaaaccaacggaatcccc

SEQ ID NO: 780 - DNA, 21 bp, synthetic construct
  misc_feature 1..21: note = n-mer motif encoding polynucleotide
  source 1..21: mol_type = other DNA
gttaacgacaaccgaggaaac

SEQ ID NO: 781 - DNA, 21 bp, synthetic construct
  source 1..21: mol_type = other DNA
  misc_feature 1..21: note = n-mer motif encoding polynucleotide
atgcacaccataacgggatcc

SEQ ID NO: 782 - DNA, 21 bp, synthetic construct
  source 1..21: mol_type = other DNA
  misc_feature 1..21: note = n-mer motif encoding polynucleotide
attgatggtgttcagaagctt

SEQ ID NO: 783 - DNA, 21 bp, synthetic construct
  source 1..21: mol_type = other DNA
  misc_feature 1..21: note = n-mer motif encoding polynucleotide
gcgcaggttaataatcatgat

SEQ ID NO: 784 - DNA, 21 bp, synthetic construct
  misc_feature 1..21: note = n-mer motif encoding polynucleotide
  source 1..21: mol_type = other DNA
gtttcttcgcctaatggtacg

SEQ ID NO: 785 - DNA, 21 bp, synthetic construct
  source 1..21: mol_type = other DNA
  misc_feature 1..21: note = n-mer motif encoding polynucleotide
gattctgctccgagggctatt

SEQ ID NO: 786 - DNA, 21 bp, synthetic construct
  misc_feature 1..21: note = n-mer motif encoding polynucleotide
  source 1..21: mol_type = other DNA
tctgcgagtgatagtcagcat

SEQ ID NO: 787 - DNA, 21 bp, synthetic construct
  misc_feature 1..21: note = n-mer motif encoding polynucleotide
  source 1..21: mol_type = other DNA
tcggctcatcagacgccgacg

SEQ ID NO: 788 - DNA, 21 bp, synthetic construct
  source 1..21: mol_type = other DNA
  misc_feature 1..21: note = n-mer motif encoding polynucleotide
gcgacgctgaataatagttat

SEQ ID NO: 789 - DNA, 21 bp, synthetic construct
  source 1..21: mol_type = other DNA
  misc_feature 1..21: note = n-mer motif encoding polynucleotide
gaagacagtatgagattctct

SEQ ID NO: 790 - DNA, 21 bp, synthetic construct
  misc_feature 1..21: note = n-mer motif encoding polynucleotide
  source 1..21: mol_type = other DNA
gaacgaaacggactaatagaa

SEQ ID NO: 791 - DNA, 21 bp, synthetic construct
  source 1..21: mol_type = other DNA
  misc_feature 1..21: note = n-mer motif encoding polynucleotide
ttagtacttgactcacggaac

SEQ ID NO: 792 - DNA, 21 bp, synthetic construct
  source 1..21: mol_type = other DNA
  misc_feature 1..21: note = n-mer motif encoding polynucleotide
accgtcgaacaaataaactcg

SEQ ID NO: 793 - DNA, 21 bp, synthetic construct
  misc_feature 1..21: note = n-mer motif encoding polynucleotide
  source 1..21: mol_type = other DNA
gggacaggtaccgttggatgg

SEQ ID NO: 794 - DNA, 21 bp, synthetic construct
  source 1..21: mol_type = other DNA
  misc_feature 1..21: note = n-mer motif encoding polynucleotide
aatcagcagcgtattgataat

SEQ ID NO: 795 - DNA, 21 bp, synthetic construct
  misc_feature 1..21: note = n-mer motif encoding polynucleotide
  source 1..21: mol_type = other DNA
atccaaaacggggtcctgcca

SEQ ID NO: 796 - DNA, 21 bp, synthetic construct
  misc_feature 1..21: note = n-mer motif encoding polynucleotide
  source 1..21: mol_type = other DNA
ggagacatctcaagcagaaac

SEQ ID NO: 797 - DNA, 21 bp, synthetic construct
  misc_feature 1..21: note = n-mer motif encoding polynucleotide
  source 1..21: mol_type = other DNA
gtcactggcactaccccggga

SEQ ID NO: 798 - DNA, 21 bp, synthetic construct
  misc_feature 1..21: note = n-mer motif encoding polynucleotide
  source 1..21: mol_type = other DNA
acaagggaatcaatgtccatc

SEQ ID NO: 799 - DNA, 21 bp, synthetic construct
  misc_feature 1..21: note = n-mer motif encoding polynucleotide
  source 1..21: mol_type = other DNA
cacacttactcacaagcagac

SEQ ID NO: 800 - DNA, 21 bp, synthetic construct
  misc_feature 1..21: note = n-mer motif encoding polynucleotide
  source 1..21: mol_type = other DNA
tccaacatgggcgtagcctct

SEQ ID NO: 801 - DNA, 21 bp, synthetic construct
  misc_feature 1..21: note = n-mer motif encoding polynucleotide
  source 1..21: mol_type = other DNA
cacgacttgaaccacggaaaa

SEQ ID NO: 802 - DNA, 21 bp, synthetic construct
  misc_feature 1..21: note = n-mer motif encoding polynucleotide
  source 1..21: mol_type = other DNA
ctgtacgggggagcacaccaa

SEQ ID NO: 803 - DNA, 21 bp, synthetic construct
  source 1..21: mol_type = other DNA
  misc_feature 1..21: note = n-mer motif encoding polynucleotide
aacgtgtacggagacggaata

SEQ ID NO: 804 - DNA, 21 bp, synthetic construct
  misc_feature 1..21: note = n-mer motif encoding polynucleotide
  source 1..21: mol_type = other DNA
tctactattaatatgcgtgcg

SEQ ID NO: 805 - DNA, 21 bp, synthetic construct
  source 1..21: mol_type = other DNA
  misc_feature 1..21: note = n-mer motif encoding polynucleotide
aagatggggagtattgaggtt

SEQ ID NO: 806 - DNA, 21 bp, synthetic construct
  source 1..21: mol_type = other DNA
  misc_feature 1..21: note = n-mer motif encoding polynucleotide
tccgaaacgcgcgctggatac

SEQ ID NO: 807 - DNA, 21 bp, synthetic construct
  misc_feature 1..21: note = n-mer motif encoding polynucleotide
  source 1..21: mol_type = other DNA
aatgtgggtaatactcttggg

SEQ ID NO: 808 - DNA, 21 bp, synthetic construct
  misc_feature 1..21: note = n-mer motif encoding polynucleotide
  source 1..21: mol_type = other DNA
attggtgggactgatacgcgg

SEQ ID NO: 809 - DNA, 21 bp, synthetic construct
  misc_feature 1..21: note = n-mer motif encoding polynucleotide
  source 1..21: mol_type = other DNA
gccgacaaaggattcggccac

SEQ ID NO: 810 - DNA, 21 bp, synthetic construct
  source 1..21: mol_type = other DNA
  misc_feature 1..21: note = n-mer motif encoding polynucleotide
tggcaggatcataataaggtg

SEQ ID NO: 811 - DNA, 21 bp, synthetic construct
  misc_feature 1..21: note = n-mer motif encoding polynucleotide
  source 1..21: mol_type = other DNA
aactacggttccggacgaatc

SEQ ID NO: 812 - DNA, 21 bp, synthetic construct
  source 1..21: mol_type = other DNA
  misc_feature 1..21: note = n-mer motif encoding polynucleotide
actcataagcaggtggatctt

SEQ ID NO: 813 - DNA, 21 bp, synthetic construct
  misc_feature 1..21: note = n-mer motif encoding polynucleotide
  source 1..21: mol_type = other DNA
cggcagaatgataagggtaat

SEQ ID NO: 814 - DNA, 21 bp, synthetic construct
  source 1..21: mol_type = other DNA
  misc_feature 1..21: note = n-mer motif encoding polynucleotide
ggtaggaatgagagtccggag

SEQ ID NO: 815 - DNA, 21 bp, synthetic construct
  source 1..21: mol_type = other DNA
  misc_feature 1..21: note = n-mer motif encoding polynucleotide
gtttttactgggcagacggag

SEQ ID NO: 816 - DNA, 21 bp, synthetic construct
  misc_feature 1..21: note = n-mer motif encoding polynucleotide
  source 1..21: mol_type = other DNA
tatgttgatcgtaaggataat

SEQ ID NO: 817 - DNA, 21 bp, synthetic construct
  misc_feature 1..21: note = n-mer motif encoding polynucleotide
  source 1..21: mol_type = other DNA
aataatactttgaatattttg

SEQ ID NO: 818 - DNA, 21 bp, synthetic construct
  source 1..21: mol_type = other DNA
  misc_feature 1..21: note = n-mer motif encoding polynucleotide
ttgagctacagcatccaacac

SEQ ID NO: 819 - DNA, 21 bp, synthetic construct
  source 1..21: mol_type = other DNA
  misc_feature 1..21: note = n-mer motif encoding polynucleotide
gctaccaacagatcgccccta

SEQ ID NO: 820 - DNA, 21 bp, synthetic construct
  misc_feature 1..21: note = n-mer motif encoding polynucleotide
  source 1..21: mol_type = other DNA
gttcacaccgcagacacaata

SEQ ID NO: 821 - DNA, 21 bp, synthetic construct
  source 1..21: mol_type = other DNA
  misc_feature 1..21: note = n-mer motif encoding polynucleotide
gggcatttggttaatatgtct

SEQ ID NO: 822 - DNA, 21 bp, synthetic construct
  source 1..21: mol_type = other DNA
  misc_feature 1..21: note = n-mer motif encoding polynucleotide
ttagactacacccctcaaaac

SEQ ID NO: 823 - DNA, 21 bp, synthetic construct
  misc_feature 1..21: note = n-mer motif encoding polynucleotide
  source 1..21: mol_type = other DNA
tccgcctcttactccaggatg

SEQ ID NO: 824 - DNA, 21 bp, synthetic construct
  misc_feature 1..21: note = n-mer motif encoding polynucleotide
  source 1..21: mol_type = other DNA
tccggagcggcacaaaaccca

SEQ ID NO: 825 - DNA, 21 bp, synthetic construct
  source 1..21: mol_type = other DNA
  misc_feature 1..21: note = n-mer motif encoding polynucleotide
agaaacacacttgctgacctt

SEQ ID NO: 826 - DNA, 21 bp, synthetic construct
  misc_feature 1..21: note = n-mer motif encoding polynucleotide
  source 1..21: mol_type = other DNA
ggttctacggtgtcggcgcag

SEQ ID NO: 827 - DNA, 21 bp, synthetic construct
  misc_feature 1..21: note = n-mer motif encoding polynucleotide
  source 1..21: mol_type = other DNA
tctaaggatagtactatgtat

SEQ ID NO: 828 - DNA, 21 bp, synthetic construct
  source 1..21: mol_type = other DNA
  misc_feature 1..21: note = n-mer motif encoding polynucleotide
gtggtggttcacactatccca

SEQ ID NO: 829 - DNA, 21 bp, synthetic construct
  source 1..21: mol_type = other DNA
  misc_feature 1..21: note = n-mer motif encoding polynucleotide
ccacgtactgtctcattggac

SEQ ID NO: 830 - DNA, 21 bp, synthetic construct
  misc_feature 1..21: note = n-mer motif encoding polynucleotide
  source 1..21: mol_type = other DNA
atgatgaagagtgaggagaat

SEQ ID NO: 831 - DNA, 21 bp, synthetic construct
  source 1..21: mol_type = other DNA
  misc_feature 1..21: note = n-mer motif encoding polynucleotide
accaccgaccggccaaacgga

SEQ ID NO: 832 - DNA, 21 bp, synthetic construct
  source 1..21: mol_type = other DNA
  misc_feature 1..21: note = n-mer motif encoding polynucleotide
catagtcctcctacgactatg

SEQ ID NO: 833 - DNA, 21 bp, synthetic construct
  misc_feature 1..21: note = n-mer motif encoding polynucleotide
  source 1..21: mol_type = other DNA
ggccaatggacaacagggaca

SEQ ID NO: 834 - DNA, 21 bp, synthetic construct
  misc_feature 1..21: note = n-mer motif encoding polynucleotide
  source 1..21: mol_type = other DNA
gacggtatgaacggagtgggt

SEQ ID NO: 835 - DNA, 21 bp, synthetic construct
  misc_feature 1..21: note = n-mer motif encoding polynucleotide
  source 1..21: mol_type = other DNA
cttcatactgttgcgaatgag

SEQ ID NO: 836 - DNA, 21 bp, synthetic construct
  misc_feature 1..21: note = n-mer motif encoding polynucleotide
  source 1..21: mol_type = other DNA
tatacgtcgcagacgtctacg

SEQ ID NO: 837 - DNA, 21 bp, synthetic construct
  misc_feature 1..21: note = n-mer motif encoding polynucleotide
  source 1..21: mol_type = other DNA
aacttctccgaaatgtccaca

SEQ ID NO: 838 - DNA, 21 bp, synthetic construct
  misc_feature 1..21: note = n-mer motif encoding polynucleotide
  source 1..21: mol_type = other DNA
attaatattcgtagtgatttg

SEQ ID NO: 839 - DNA, 21 bp, synthetic construct
  source 1..21: mol_type = other DNA
  misc_feature 1..21: note = n-mer motif encoding polynucleotide
ccctccaacagtgaaagattc

SEQ ID NO: 840 - DNA, 21 bp, synthetic construct
  source 1..21: mol_type = other DNA
  misc_feature 1..21: note = n-mer motif encoding polynucleotide
tatacgaattatggggatctt

SEQ ID NO: 841 - DNA, 21 bp, synthetic construct
  misc_feature 1..21: note = n-mer motif encoding polynucleotide
  source 1..21: mol_type = other DNA
gataagagtacggcgcaggcg

SEQ ID NO: 842 - DNA, 21 bp, synthetic construct
  misc_feature 1..21: note = n-mer motif encoding polynucleotide
  source 1..21: mol_type = other DNA
cacaccgacatggtatcctct

SEQ ID NO: 843 - DNA, 21 bp, synthetic construct
  source 1..21: mol_type = other DNA
  misc_feature 1..21: note = n-mer motif encoding polynucleotide
aacaaaagtctgtcaatggac

SEQ ID NO: 844 - DNA, 21 bp, synthetic construct
  misc_feature 1..21: note = n-mer motif encoding polynucleotide
  source 1..21: mol_type = other DNA
gggcactacgctacaaacaca

SEQ ID NO: 845 - DNA, 21 bp, synthetic construct
  misc_feature 1..21: note = n-mer motif encoding polynucleotide
  source 1..21: mol_type = other DNA
gtcatcgtatctacaaaatca

SEQ ID NO: 846 - DNA, 21 bp, synthetic construct
  source 1..21: mol_type = other DNA
  misc_feature 1..21: note = n-mer motif encoding polynucleotide
actcatagtcttatgaatgat

SEQ ID NO: 847 - DNA, 21 bp, synthetic construct
  source 1..21: mol_type = other DNA
  misc_feature 1..21: note = n-mer motif encoding polynucleotide
aactaccacggagacaacgtt

SEQ ID NO: 848 - DNA, 21 bp, synthetic construct
  source 1..21: mol_type = other DNA
  misc_feature 1..21: note = n-mer motif encoding polynucleotide
cgtgatgatcagcagcttgat

SEQ ID NO: 849 - DNA, 21 bp, synthetic construct
  source 1..21: mol_type = other DNA
  misc_feature 1..21: note = n-mer motif encoding polynucleotide
gatgataagactggtcggtat

SEQ ID NO: 850 - DNA, 21 bp, synthetic construct
  misc_feature 1..21: note = n-mer motif encoding polynucleotide
  source 1..21: mol_type = other DNA
gggtcgagccaacaccacgaa

SEQ ID NO: 851 - DNA, 21 bp, synthetic construct
  source 1..21: mol_type = other DNA
  misc_feature 1..21: note = n-mer motif encoding polynucleotide
cgtgttacaggtgtctcaaca

SEQ ID NO: 852 - DNA, 21 bp, synthetic construct
  source 1..21: mol_type = other DNA
  misc_feature 1..21: note = n-mer motif encoding polynucleotide
agtactgcgtcggggcatact

SEQ ID NO: 853 - DNA, 21 bp, synthetic construct
  misc_feature 1..21: note = n-mer motif encoding polynucleotide
  source 1..21: mol_type = other DNA
actaacaacctctcatacgaa

SEQ ID NO: 854 - DNA, 21 bp, synthetic construct
  misc_feature 1..21: note = n-mer motif encoding polynucleotide
  source 1..21: mol_type = other DNA
cagcataatagtgcgtcggcg

SEQ ID NO: 855 - DNA, 21 bp, synthetic construct
  source 1..21: mol_type = other DNA
  misc_feature 1..21: note = n-mer motif encoding polynucleotide
ccggctaagggttttggtcat

SEQ ID NO: 856 - DNA, 21 bp, synthetic construct
  misc_feature 1..21: note = n-mer motif encoding polynucleotide
  source 1..21: mol_type = other DNA
tggtacgaaacaatcagcccg

SEQ ID NO: 857 - DNA, 21 bp, synthetic construct
  source 1..21: mol_type = other DNA
  misc_feature 1..21: note = n-mer motif encoding polynucleotide
acggatgctacggggaggcat

SEQ ID NO: 858 - DNA, 21 bp, synthetic construct
  source 1..21: mol_type = other DNA
  misc_feature 1..21: note = n-mer motif encoding polynucleotide
attcaggcgaagaattctgag

SEQ ID NO: 859 - DNA, 21 bp, synthetic construct
  misc_feature 1..21: note = n-mer motif encoding polynucleotide
  source 1..21: mol_type = other DNA
agtactgagactaggggtggg

SEQ ID NO: 860 - DNA, 21 bp, synthetic construct
  source 1..21: mol_type = other DNA
  misc_feature 1..21: note = n-mer motif encoding polynucleotide
ttctcaacaaactctgtaatc

SEQ ID NO: 861 - DNA, 21 bp, synthetic construct
  misc_feature 1..21: note = n-mer motif encoding polynucleotide
  source 1..21: mol_type = other DNA
tctaaccttcgaaacacaata

SEQ ID NO: 862 - DNA, 21 bp, synthetic construct
  source 1..21: mol_type = other DNA
  misc_feature 1..21: note = n-mer motif encoding polynucleotide
gggatgatcgggcacaacgca

SEQ ID NO: 863 - DNA, 21 bp, synthetic construct
  misc_feature 1..21: note = n-mer motif encoding polynucleotide
  source 1..21: mol_type = other DNA
tctggccaaggattctcggca

SEQ ID NO: 864 - DNA, 21 bp, synthetic construct
  source 1..21: mol_type = other DNA
  misc_feature 1..21: note = n-mer motif encoding polynucleotide
acccacaactctacaggcctt

SEQ ID NO: 865 - DNA, 21 bp, synthetic construct
  source 1..21: mol_type = other DNA
  misc_feature 1..21: note = n-mer motif encoding polynucleotide
aggattgatagtgctatggtg

SEQ ID NO: 866 - DNA, 21 bp, synthetic construct
  source 1..21: mol_type = other DNA
  misc_feature 1..21: note = n-mer motif encoding polynucleotide
gtcgctatgggaggcggtccc

SEQ ID NO: 867 - DNA, 21 bp, synthetic construct
  source 1..21: mol_type = other DNA
  misc_feature 1..21: note = n-mer motif encoding polynucleotide
ggctctcacaacggcccagcc

SEQ ID NO: 868 - DNA, 21 bp, synthetic construct
  source 1..21: mol_type = other DNA
  misc_feature 1..21: note = n-mer motif encoding polynucleotide
cactccgcagcgggtgacggt

SEQ ID NO: 869 - DNA, 21 bp, synthetic construct
  misc_feature 1..21: note = n-mer motif encoding polynucleotide
  source 1..21: mol_type = other DNA
gcacaaggcataacccacgct

SEQ ID NO: 870 - DNA, 21 bp, synthetic construct
  misc_feature 1..21: note = n-mer motif encoding polynucleotide
  source 1..21: mol_type = other DNA
tctgcgcttttgcggatggat

SEQ ID NO: 871 - DNA, 21 bp, synthetic construct
  misc_feature 1..21: note = n-mer motif encoding polynucleotide
  source 1..21: mol_type = other DNA
tggcaaatgggggccgggagc

SEQ ID NO: 872 - DNA, 21 bp, synthetic construct
  misc_feature 1..21: note = n-mer motif encoding polynucleotide
  source 1..21: mol_type = other DNA
atagactcgcacgccagcata

SEQ ID NO: 873 - DNA, 21 bp, synthetic construct
  misc_feature 1..21: note = n-mer motif encoding polynucleotide
  source 1..21: mol_type = other DNA
agcctagaccacgcccctcta

SEQ ID NO: 874 - DNA, 21 bp, synthetic construct
  source 1..21: mol_type = other DNA
  misc_feature 1..21: note = n-mer motif encoding polynucleotide
gaaaacaacatgcaacacggc

SEQ ID NO: 875 - DNA, 21 bp, synthetic construct
  misc_feature 1..21: note = n-mer motif encoding polynucleotide
  source 1..21: mol_type = other DNA
aagggtgcgcagggtgttcag

SEQ ID NO: 876 - DNA, 21 bp, synthetic construct
  source 1..21: mol_type = other DNA
  misc_feature 1..21: note = n-mer motif encoding polynucleotide
gtcgctgtatcgaacactcca

SEQ ID NO: 877 - DNA, 21 bp, synthetic construct
  misc_feature 1..21: note = n-mer motif encoding polynucleotide
  source 1..21: mol_type = other DNA
gttgagtcttcttattctcgg

SEQ ID NO: 878 - DNA, 21 bp, synthetic construct
  source 1..21: mol_type = other DNA
  misc_feature 1..21: note = n-mer motif encoding polynucleotide
cataatacggagtctaagact

SEQ ID NO: 879 - DNA, 21 bp, synthetic construct
  misc_feature 1..21: note = n-mer motif encoding polynucleotide
  source 1..21: mol_type = other DNA
aatgagagtacgaaggagagt

SEQ ID NO: 880 - DNA, 21 bp, synthetic construct
  source 1..21: mol_type = other DNA
  misc_feature 1..21: note = n-mer motif encoding polynucleotide
gatgtttatcttaagagtccg

SEQ ID NO: 881 - DNA, 21 bp, synthetic construct
  source 1..21: mol_type = other DNA
  misc_feature 1..21: note = n-mer motif encoding polynucleotide
cagtcgggggctaggactctg

SEQ ID NO: 882 - DNA, 21 bp, synthetic construct
  misc_feature 1..21: note = n-mer motif encoding polynucleotide
  source 1..21: mol_type = other DNA
tcgaacagtcaagtacacaac

SEQ ID NO: 883 - DNA, 21 bp, synthetic construct
  source 1..21: mol_type = other DNA
  misc_feature 1..21: note = n-mer motif encoding polynucleotide
gtagtctcatcgggcggctgg

SEQ ID NO: 884 - DNA, 21 bp, synthetic construct
  source 1..21: mol_type = other DNA
  misc_feature 1..21: note = n-mer motif encoding polynucleotide
ccatcaagtttcaacagcgcc

SEQ ID NO: 885 - DNA, 21 bp, synthetic construct
  misc_feature 1..21: note = n-mer motif encoding polynucleotide
  source 1..21: mol_type = other DNA
aagcagactgatagtaggggt

SEQ ID NO: 886 - DNA, 21 bp, synthetic construct
  source 1..21: mol_type = other DNA
  misc_feature 1..21: note = n-mer motif encoding polynucleotide
aacacaacgccacctaaccac

SEQ ID NO: 887 - DNA, 21 bp, synthetic construct
  misc_feature 1..21: note = n-mer motif encoding polynucleotide
  source 1..21: mol_type = other DNA
caaaacggaacctcgtctata

SEQ ID NO: 888 - DNA, 21 bp, synthetic construct
  misc_feature 1..21: note = n-mer motif encoding polynucleotide
  source 1..21: mol_type = other DNA
ctcatgaaagacatggaatcc

SEQ ID NO: 889 - DNA, 21 bp, synthetic construct
  source 1..21: mol_type = other DNA
  misc_feature 1..21: note = n-mer motif encoding polynucleotide
actcagactggtcatgtttct

SEQ ID NO: 890 - DNA, 21 bp, synthetic construct
  misc_feature 1..21: note = n-mer motif encoding polynucleotide
  source 1..21: mol_type = other DNA
gaaatacacacgaccacaggc

SEQ ID NO: 891 - DNA, 21 bp, synthetic construct
  misc_feature 1..21: note = n-mer motif encoding polynucleotide
  source 1..21: mol_type = other DNA
atacaaactactacaaaatgc

SEQ ID NO: 892 - DNA, 21 bp, synthetic construct
  misc_feature 1..21: note = n-mer motif encoding polynucleotide
  source 1..21: mol_type = other DNA
cccgctgaaggaaacaaccgt

SEQ ID NO: 893 - DNA, 21 bp, synthetic construct
  misc_feature 1..21: note = n-mer motif encoding polynucleotide
  source 1..21: mol_type = other DNA
tacatcgccggaggggaacaa

SEQ ID NO: 894 - DNA, 21 bp, synthetic construct
  source 1..21: mol_type = other DNA
  misc_feature 1..21: note = n-mer motif encoding polynucleotide
gaagtacgcgaccaaaaaaca

SEQ ID NO: 895 - DNA, 21 bp, synthetic construct
  source 1..21: mol_type = other DNA
  misc_feature 1..21: note = n-mer motif encoding polynucleotide
tacgccgtcgcgataggcaca

SEQ ID NO: 896 - DNA, 21 bp, synthetic construct
  source 1..21: mol_type = other DNA
  misc_feature 1..21: note = n-mer motif encoding polynucleotide
tccgctaacgaacacaaccac

SEQ ID NO: 897 - DNA, 21 bp, synthetic construct
  misc_feature 1..21: note = n-mer motif encoding polynucleotide
  source 1..21: mol_type = other DNA
gggatgagggatacgccgccg

SEQ ID NO: 898 - DNA, 21 bp, synthetic construct
  source 1..21: mol_type = other DNA
  misc_feature 1..21: note = n-mer motif encoding polynucleotide
gctcagcagattgttaatggg

SEQ ID NO: 899 - DNA, 21 bp, synthetic construct
  source 1..21: mol_type = other DNA
  misc_feature 1..21: note = n-mer motif encoding polynucleotide
tcaagttcccaaacggttttg

SEQ ID NO: 900 - DNA, 21 bp, synthetic construct
  source 1..21: mol_type = other DNA
  misc_feature 1..21: note = n-mer motif encoding polynucleotide
gttattcagtctgataatacg

SEQ ID NO: 901 - DNA, 21 bp, synthetic construct
  source 1..21: mol_type = other DNA
  misc_feature 1..21: note = n-mer motif encoding polynucleotide
gttccggcgcattctcggggt

SEQ ID NO: 902 - DNA, 21 bp, synthetic construct
  misc_feature 1..21: note = n-mer motif encoding polynucleotide
  source 1..21: mol_type = other DNA
tcgaatacggggtcgttgggt

SEQ ID NO: 903 - DNA, 21 bp, synthetic construct
  source 1..21: mol_type = other DNA
  misc_feature 1..21: note = n-mer motif encoding polynucleotide
tgggccaaagacgtcaacgtc

SEQ ID NO: 904 - DNA, 21 bp, synthetic construct
  source 1..21: mol_type = other DNA
  misc_feature 1..21: note = n-mer motif encoding polynucleotide
aatgtgttgggtgcttcgagt

SEQ ID NO: 905 - DNA, 21 bp, synthetic construct
  misc_feature 1..21: note = n-mer motif encoding polynucleotide
  source 1..21: mol_type = other DNA
actccggaggctagtgcgcgt

SEQ ID NO: 906 - DNA, 21 bp, synthetic construct
  source 1..21: mol_type = other DNA
  misc_feature 1..21: note = n-mer motif encoding polynucleotide
aattataatggggttaatgtg

SEQ ID NO: 907 - DNA, 21 bp, synthetic construct
  misc_feature 1..21: note = n-mer motif encoding polynucleotide
  source 1..21: mol_type = other DNA
aacacaaccggtagctcgggc

SEQ ID NO: 908 - DNA, 21 bp, synthetic construct
  misc_feature 1..21: note = n-mer motif encoding polynucleotide
  source 1..21: mol_type = other DNA
tccagcggccaaccgctcgtc

SEQ ID NO: 909 - DNA, 21 bp, synthetic construct
  misc_feature 1..21: note = n-mer motif encoding polynucleotide
  source 1..21: mol_type = other DNA
caggcggggggtgtggcgagt

SEQ ID NO: 910 - DNA, 21 bp, synthetic construct
  source 1..21: mol_type = other DNA
  misc_feature 1..21: note = n-mer motif encoding polynucleotide
ccgcttcaatcccaatcggga

SEQ ID NO: 911 - DNA, 21 bp, synthetic construct
  misc_feature 1..21: note = n-mer motif encoding polynucleotide
  source 1..21: mol_type = other DNA
caacgtacctcggaagcgcca

SEQ ID NO: 912 - DNA, 21 bp, synthetic construct
  misc_feature 1..21: note = n-mer motif encoding polynucleotide
  source 1..21: mol_type = other DNA
ttggctaagacggttgcgatt

SEQ ID NO: 913 - DNA, 21 bp, synthetic construct
  source 1..21: mol_type = other DNA
  misc_feature 1..21: note = n-mer motif encoding polynucleotide
acccacacccttgggggaaca

SEQ ID NO: 914 - DNA, 21 bp, synthetic construct
  source 1..21: mol_type = other DNA
  misc_feature 1..21: note = n-mer motif encoding polynucleotide
cacgactacagtatgaacgcg

SEQ ID NO: 915 - DNA, 21 bp, synthetic construct
  misc_feature 1..21: note = n-mer motif encoding polynucleotide
  source 1..21: mol_type = other DNA
gggaaacctgcggaagcgccg

SEQ ID NO: 916 - DNA, 21 bp, synthetic construct
  source 1..21: mol_type = other DNA
  misc_feature 1..21: note = n-mer motif encoding polynucleotide
agaaacgaaaacgtaaacgct

SEQ ID NO: 917 - DNA, 21 bp, synthetic construct
  source 1..21: mol_type = other DNA
  misc_feature 1..21: note = n-mer motif encoding polynucleotide
agttctcgggaggcgaagttt

SEQ ID NO: 918 - DNA, 21 bp, synthetic construct
  misc_feature 1..21: note = n-mer motif encoding polynucleotide
  source 1..21: mol_type = other DNA
tcttcttctgatagtccgcgt

SEQ ID NO: 919 - DNA, 21 bp, synthetic construct
  misc_feature 1..21: note = n-mer motif encoding polynucleotide
  source 1..21: mol_type = other DNA
atgaatacgacttataatgag

SEQ ID NO: 920 - DNA, 21 bp, synthetic construct
  misc_feature 1..21: note = n-mer motif encoding polynucleotide
  source 1..21: mol_type = other DNA
gtaaggagtggaataaaacca

SEQ ID NO: 921 - DNA, 21 bp, synthetic construct
  source 1..21: mol_type = other DNA
  misc_feature 1..21: note = n-mer motif encoding polynucleotide
caggagaatcctatgaagatg

SEQ ID NO: 922 - DNA, 21 bp, synthetic construct
  misc_feature 1..21: note = n-mer motif encoding polynucleotide
  source 1..21: mol_type = other DNA
actgagccgcttccgatgtct

SEQ ID NO: 923 - DNA, 21 bp, synthetic construct
  misc_feature 1..21: note = n-mer motif encoding polynucleotide
  source 1..21: mol_type = other DNA
cgccacggggacacaccgatg

SEQ ID NO: 924 - DNA, 21 bp, synthetic construct
  source 1..21: mol_type = other DNA
  misc_feature 1..21: note = n-mer motif encoding polynucleotide
gcggtgaatacgtataatagt

SEQ ID NO: 925 - DNA, 21 bp, synthetic construct
  source 1..21: mol_type = other DNA
  misc_feature 1..21: note = n-mer motif encoding polynucleotide
gcgtcgactgagtctcatgtg

SEQ ID NO: 926 - DNA, 21 bp, synthetic construct
  misc_feature 1..21: note = n-mer motif encoding polynucleotide
  source 1..21: mol_type = other DNA
acaaacctaagtcaatcggcc

SEQ ID NO: 927 - DNA, 21 bp, synthetic construct
  misc_feature 1..21: note = n-mer motif encoding polynucleotide
  source 1..21: mol_type = other DNA
gagctgtctactcctatggtt

SEQ ID NO: 928 - DNA, 21 bp, synthetic construct
  source 1..21: mol_type = other DNA
  misc_feature 1..21: note = n-mer motif encoding polynucleotide
tatgcgcatcctgtgactcat

SEQ ID NO: 929 - DNA, 21 bp, synthetic construct
  misc_feature 1..21: note = n-mer motif encoding polynucleotide
  source 1..21: mol_type = other DNA
cgggggtctactggtacgcag

SEQ ID NO: 930 - DNA, 21 bp, synthetic construct
  source 1..21: mol_type = other DNA
  misc_feature 1..21: note = n-mer motif encoding polynucleotide
tgtgttggttcgtgtggtgtg

SEQ ID NO: 931 - DNA, 21 bp, synthetic construct
  source 1..21: mol_type = other DNA
  misc_feature 1..21: note = n-mer motif encoding polynucleotide
tcggttgctaaggatcagacg

SEQ ID NO: 932 - DNA, 21 bp, synthetic construct
  source 1..21: mol_type = other DNA
  misc_feature 1..21: note = n-mer motif encoding polynucleotide
acgaatctttctcctaagacg

SEQ ID NO: 933 - DNA, 21 bp, synthetic construct
  source 1..21: mol_type = other DNA
  misc_feature 1..21: note = n-mer motif encoding polynucleotide
ctaggtttcacaccccaaccg

SEQ ID NO: 934 - DNA, 21 bp, synthetic construct
  source 1..21: mol_type = other DNA
  misc_feature 1..21: note = n-mer motif encoding polynucleotide
aatattagtagtattaatcag

SEQ ID NO: 935 - DNA, 21 bp, synthetic construct
  misc_feature 1..21: note = n-mer motif encoding polynucleotide
  source 1..21: mol_type = other DNA
gtttacgacaacgtttcttct

SEQ ID NO: 936 - DNA, 21 bp, synthetic construct
  misc_feature 1..21: note = n-mer motif encoding polynucleotide
  source 1..21: mol_type = other DNA
agtggaaaacaagacaaatac

SEQ ID NO: 937 - DNA, 21 bp, synthetic construct
  source 1..21: mol_type = other DNA
  misc_feature 1..21: note = n-mer motif encoding polynucleotide
agacttacagaactggtcata

SEQ ID NO: 938 - DNA, 21 bp, synthetic construct
  source 1..21: mol_type = other DNA
  misc_feature 1..21: note = n-mer motif encoding polynucleotide
cataagagtgagagtcataat

SEQ ID NO: 939 - DNA, 21 bp, synthetic construct
  misc_feature 1..21: note = n-mer motif encoding polynucleotide
  source 1..21: mol_type = other DNA
gaggcgactcatggttcttat

SEQ ID NO: 940 - DNA, 21 bp, synthetic construct
  source 1..21: mol_type = other DNA
  misc_feature 1..21: note = n-mer motif encoding polynucleotide
aacctacttgtcgaccaacgt

SEQ ID NO: 941 - DNA, 21 bp, synthetic construct
  misc_feature 1..21: note = n-mer motif encoding polynucleotide
  source 1..21: mol_type = other DNA
aatattaatgatactaagaat

SEQ ID NO: 942 - DNA, 21 bp, synthetic construct
  misc_feature 1..21: note = n-mer motif encoding polynucleotide
  source 1..21: mol_type = other DNA
cttgcggttacgaatgtgcgg

SEQ ID NO: 943 - DNA, 21 bp, synthetic construct
  misc_feature 1..21: note = n-mer motif encoding polynucleotide
  source 1..21: mol_type = other DNA
ccgtcgacactcgctgaaaca

SEQ ID NO: 944 - DNA, 21 bp, synthetic construct
  source 1..21: mol_type = other DNA
  misc_feature 1..21: note = n-mer motif encoding polynucleotide
ccgaagcctgggacgggggag

SEQ ID NO: 945 - DNA, 21 bp, synthetic construct
  source 1..21: mol_type = other DNA
  misc_feature 1..21: note = n-mer motif encoding polynucleotide
gtgctgttgcagaattctcat

SEQ ID NO: 946 - DNA, 21 bp, synthetic construct
  source 1..21: mol_type = other DNA
  misc_feature 1..21: note = n-mer motif encoding polynucleotide
tacggtaacgcgaacaccgta

SEQ ID NO: 947 - DNA, 21 bp, synthetic construct
  source 1..21: mol_type = other DNA
  misc_feature 1..21: note = n-mer motif encoding polynucleotide
acatctggagttctgacacgc

SEQ ID NO: 948 - DNA, 21 bp, synthetic construct
  source 1..21: mol_type = other DNA
  misc_feature 1..21: note = n-mer motif encoding polynucleotide
aaaataacggaaaccaacctc

SEQ ID NO: 949 - DNA, 21 bp, synthetic construct
  source 1..21: mol_type = other DNA
  misc_feature 1..21: note = n-mer motif encoding polynucleotide
gttcgcagagacgaaacacct

SEQ ID NO: 950 - DNA, 21 bp, synthetic construct
  source 1..21: mol_type = other DNA
  misc_feature 1..21: note = n-mer motif encoding polynucleotide
tctaaaatgtcaaacccagtg

SEQ ID NO: 951 - DNA, 21 bp, synthetic construct
  misc_feature 1..21: note = n-mer motif encoding polynucleotide
  source 1..21: mol_type = other DNA
tgggaatccctctccaacgca

SEQ ID NO: 952 - DNA, 21 bp, synthetic construct
  misc_feature 1..21: note = n-mer motif encoding polynucleotide
  source 1..21: mol_type = other DNA
gccaacggaggaggatacccc

SEQ ID NO: 953 - DNA, 21 bp, synthetic construct
  source 1..21: mol_type = other DNA
  misc_feature 1..21: note = n-mer motif encoding polynucleotide
atgttggcttctcgggtgcct

SEQ ID NO: 954 - DNA, 21 bp, synthetic construct
  source 1..21: mol_type = other DNA
  misc_feature 1..21: note = n-mer motif encoding polynucleotide
tgcggcctgaactgcggtaaa

SEQ ID NO: 955 - DNA, 21 bp, synthetic construct
  source 1..21: mol_type = other DNA
  misc_feature 1..21: note = n-mer motif encoding polynucleotide
actattactagtccgtcggtg

SEQ ID NO: 956 - DNA, 21 bp, synthetic construct
  misc_feature 1..21: note = n-mer motif encoding polynucleotide
  source 1..21: mol_type = other DNA
tggtcgaatgctcagagtccg

SEQ ID NO: 957 - DNA, 21 bp, synthetic construct
  source 1..21: mol_type = other DNA
  misc_feature 1..21: note = n-mer motif encoding polynucleotide
acagaaagccccaaactacta

SEQ ID NO: 958 - DNA, 21 bp, synthetic construct
  misc_feature 1..21: note = n-mer motif encoding polynucleotide
  source 1..21: mol_type = other DNA
catttggttactagtggtatt

SEQ ID NO: 959 - DNA, 21 bp, synthetic construct
  source 1..21: mol_type = other DNA
  misc_feature 1..21: note = n-mer motif encoding polynucleotide
cctcctaagtcggattcgaat

SEQ ID NO: 960 - DNA, 21 bp, synthetic construct
  source 1..21: mol_type = other DNA
  misc_feature 1..21: note = n-mer motif encoding polynucleotide
attgcggtgcatgtgctgagt

SEQ ID NO: 961 - DNA, 21 bp, synthetic construct
  misc_feature 1..21: note = n-mer motif encoding polynucleotide
  source 1..21: mol_type = other DNA
actggtactgcgactttgcct

SEQ ID NO: 962 - DNA, 21 bp, synthetic construct
  source 1..21: mol_type = other DNA
  misc_feature 1..21: note = n-mer motif encoding polynucleotide
aatactactccgcctaatcat

SEQ ID NO: 963 - DNA, 21 bp, synthetic construct
  misc_feature 1..21: note = n-mer motif encoding polynucleotide
  source 1..21: mol_type = other DNA
tgcaccgccacaaaatgctca

SEQ ID NO: 964 - DNA, 21 bp, synthetic construct
  source 1..21: mol_type = other DNA
  misc_feature 1..21: note = n-mer motif encoding polynucleotide
cacagtgacatggtcagcggc

SEQ ID NO: 965 - DNA, 21 bp, synthetic construct
  misc_feature 1..21: note = n-mer motif encoding polynucleotide
  source 1..21: mol_type = other DNA
ccaaacgcacaccacctgccc

SEQ ID NO: 966 - DNA, 21 bp, synthetic construct
  source 1..21: mol_type = other DNA
  misc_feature 1..21: note = n-mer motif encoding polynucleotide
tctaataatatgaatcaggcg

SEQ ID NO: 967 - DNA, 21 bp, synthetic construct
  source 1..21: mol_type = other DNA
  misc_feature 1..21: note = n-mer motif encoding polynucleotide
agtgataataatagggctaat

SEQ ID NO: 968 - DNA, 21 bp, synthetic construct
  misc_feature 1..21: note = n-mer motif encoding polynucleotide
  source 1..21: mol_type = other DNA
ttgcagacgcctgggacgacg

SEQ ID NO: 969 - DNA, 21 bp, synthetic construct
  misc_feature 1..21: note = n-mer motif encoding polynucleotide
  source 1..21: mol_type = other DNA
gtgcgcggcgttcaagacgcc

SEQ ID NO: 970 - DNA, 21 bp, synthetic construct
  misc_feature 1..21: note = n-mer motif encoding polynucleotide
  source 1..21: mol_type = other DNA
tctctagactcgcgctcctcg

SEQ ID NO: 971 - DNA, 21 bp, synthetic construct
  source 1..21: mol_type = other DNA
  misc_feature 1..21: note = n-mer motif encoding polynucleotide
gtttgtgttactacttgtgct

SEQ ID NO: 972 - DNA, 21 bp, synthetic construct
  misc_feature 1..21: note = n-mer motif encoding polynucleotide
  source 1..21: mol_type = other DNA
ccgaatactaatcatcttgtg

SEQ ID NO: 973 - DNA, 21 bp, synthetic construct
  misc_feature 1..21: note = n-mer motif encoding polynucleotide
  source 1..21: mol_type = other DNA
ctcatgtcagggaaagaaaac

SEQ ID NO: 974 - DNA, 21 bp, synthetic construct
  source 1..21: mol_type = other DNA
  misc_feature 1..21: note = n-mer motif encoding polynucleotide
acttctgctagtgagaattgg

SEQ ID NO: 975 - DNA, 21 bp, synthetic construct
  misc_feature 1..21: note = n-mer motif encoding polynucleotide
  source 1..21: mol_type = other DNA
tttttgccgcagctggggcag

SEQ ID NO: 976 - DNA, 21 bp, synthetic construct
  misc_feature 1..21: note = n-mer motif encoding polynucleotide
  source 1..21: mol_type = other DNA
ccttttaatcctgggaatgtg

SEQ ID NO: 977 - DNA, 21 bp, synthetic construct
  source 1..21: mol_type = other DNA
  misc_feature 1..21: note = n-mer motif encoding polynucleotide
gggacacctggtcaaagtata

SEQ ID NO: 978 - DNA, 21 bp, synthetic construct
  misc_feature 1..21: note = n-mer motif encoding polynucleotide
  source 1..21: mol_type = other DNA
tataataatggtgggcatgtt

SEQ ID NO: 979 - DNA, 21 bp, synthetic construct
  source 1..21: mol_type = other DNA
  misc_feature 1..21: note = n-mer motif encoding polynucleotide
ctcggaaaccactacacaccc

SEQ ID NO: 980 - DNA, 21 bp, synthetic construct
  misc_feature 1..21: note = n-mer motif encoding polynucleotide
  source 1..21: mol_type = other DNA
caagtcaaccaaccgagaata

SEQ ID NO: 981 - DNA, 21 bp, synthetic construct
  source 1..21: mol_type = other DNA
  misc_feature 1..21: note = n-mer motif encoding polynucleotide
ttaggaaacaaccggccacta

SEQ ID NO: 982 - DNA, 21 bp, synthetic construct
  source 1..21: mol_type = other DNA
  misc_feature 1..21: note = n-mer motif encoding polynucleotide
cctccggaaagtgccaggggc

SEQ ID NO: 983 - DNA, 21 bp, synthetic construct
  misc_feature 1..21: note = n-mer motif encoding polynucleotide
  source 1..21: mol_type = other DNA
aaatctgtaggcgacgggaga

SEQ ID NO: 984 - DNA, 21 bp, synthetic construct
  misc_feature 1..21: note = n-mer motif encoding polynucleotide
  source 1..21: mol_type = other DNA
tcacttcggacggacgaattc

SEQ ID NO: 985 - DNA, 21 bp, synthetic construct
  misc_feature 1..21: note = n-mer motif encoding polynucleotide
  source 1..21: mol_type = other DNA
agtactactaatgttgcgtat

SEQ ID NO: 986 - DNA, 21 bp, synthetic construct
  misc_feature 1..21: note = n-mer motif encoding polynucleotide
  source 1..21: mol_type = other DNA
aggatgtcggatcctagtgat

SEQ ID NO: 987 - DNA, 21 bp, synthetic construct
  source 1..21: mol_type = other DNA
  misc_feature 1..21: note = n-mer motif encoding polynucleotide
agtctgtctattacttcggcg

SEQ ID NO: 988 - DNA, 21 bp, synthetic construct
  source 1..21: mol_type = other DNA
  misc_feature 1..21: note = n-mer motif encoding polynucleotide
gaaagtgccacatctctaaaa

SEQ ID NO: 989 - DNA, 21 bp, synthetic construct
  misc_feature 1..21: note = n-mer motif encoding polynucleotide
  source 1..21: mol_type = other DNA
tacactgacggaagaaacacc

SEQ ID NO: 990 - DNA, 21 bp, synthetic construct
  source 1..21: mol_type = other DNA
  misc_feature 1..21: note = n-mer motif encoding polynucleotide
tccatatccaacctgcgtacc

SEQ ID NO: 991 - DNA, 21 bp, synthetic construct
  misc_feature 1..21: note = n-mer motif encoding polynucleotide
  source 1..21: mol_type = other DNA
caaaacgacaaatctgacaac

SEQ ID NO: 992 - DNA, 21 bp, synthetic construct
  misc_feature 1..21: note = n-mer motif encoding polynucleotide
  source 1..21: mol_type = other DNA
ggtggaacaggtctttccaaa

SEQ ID NO: 993 - DNA, 21 bp, synthetic construct
  source 1..21: mol_type = other DNA
  misc_feature 1..21: note = n-mer motif encoding polynucleotide
agtcaggctcagattcgtgtt

SEQ ID NO: 994 - DNA, 21 bp, synthetic construct
  misc_feature 1..21: note = n-mer motif encoding polynucleotide
  source 1..21: mol_type = other DNA
ggtttgatggcgcatgtgact

SEQ ID NO: 995 - DNA, 21 bp, synthetic construct
  misc_feature 1..21: note = n-mer motif encoding polynucleotide
  source 1..21: mol_type = other DNA
ctggttgtttcgaatagtctg

SEQ ID NO: 996 - DNA, 21 bp, synthetic construct
  source 1..21: mol_type = other DNA
  misc_feature 1..21: note = n-mer motif encoding polynucleotide
catgattctgtgaatacggcg

SEQ ID NO: 997 - DNA, 21 bp, synthetic construct
  misc_feature 1..21: note = n-mer motif encoding polynucleotide
  source 1..21: mol_type = other DNA
actcttgcgaaggatgggaat

SEQ ID NO: 998 - DNA, 21 bp, synthetic construct
  source 1..21: mol_type = other DNA
  misc_feature 1..21: note = n-mer motif encoding polynucleotide
tccgacggatcgaaactacta

SEQ ID NO: 999 - DNA, 21 bp, synthetic construct
  source 1..21: mol_type = other DNA
  misc_feature 1..21: note = n-mer motif encoding polynucleotide
atagacaaaacgttctcggtc

SEQ ID NO: 1000 - DNA, 21 bp, synthetic construct
  misc_feature 1..21: note = n-mer motif encoding polynucleotide
  source 1..21: mol_type = other DNA
cggctggttaacatcgaccac

SEQ ID NO: 1001 - DNA, 21 bp, synthetic construct
  misc_feature 1..21: note = n-mer motif encoding polynucleotide
  source 1..21: mol_type = other DNA
aaaaactacgacagtgactca

SEQ ID NO: 1002 - DNA, 21 bp, synthetic construct
  source 1..21: mol_type = other DNA
  misc_feature 1..21: note = n-mer motif encoding polynucleotide
agtacgcagagtactaatccg

SEQ ID NO: 1003 - DNA, 21 bp, synthetic construct
  source 1..21: mol_type = other DNA
  misc_feature 1..21: note = n-mer motif encoding polynucleotide
caaatatcactacaactcggc

SEQ ID NO: 1004 - DNA, 21 bp, synthetic construct
  source 1..21: mol_type = other DNA
  misc_feature 1..21: note = n-mer motif encoding polynucleotide
tccgaaccccttagagttgga

SEQ ID NO: 1005 - DNA, 21 bp, synthetic construct
  source 1..21: mol_type = other DNA
  misc_feature 1..21: note = n-mer motif encoding polynucleotide
agtcgtctgcagactcagcag

SEQ ID NO: 1006 - DNA, 21 bp, synthetic construct
  source 1..21: mol_type = other DNA
  misc_feature 1..21: note = n-mer motif encoding polynucleotide
gaaggttcacaaggaaaccac

SEQ ID NO: 1007 - DNA, 21 bp, synthetic construct
  source 1..21: mol_type = other DNA
  misc_feature 1..21: note = n-mer motif encoding polynucleotide
cgttctgaccttactgaaagt

SEQ ID NO: 1008 - DNA, 21 bp, synthetic construct
  misc_feature 1..21: note = n-mer motif encoding polynucleotide
  source 1..21: mol_type = other DNA
catactggtgttcagactaat

SEQ ID NO: 1009 - DNA, 21 bp, synthetic construct
  misc_feature 1..21: note = n-mer motif encoding polynucleotide
  source 1..21: mol_type = other DNA
gagttggatcatctttcgcat

SEQ ID NO: 1010 - DNA, 21 bp, synthetic construct
  source 1..21: mol_type = other DNA
  misc_feature 1..21: note = n-mer motif encoding polynucleotide
gttactggtgttgattatgcg

SEQ ID NO: 1011 - DNA, 21 bp, synthetic construct
  source 1..21: mol_type = other DNA
  misc_feature 1..21: note = n-mer motif encoding polynucleotide
ggcggcgcacacactcgtgta

SEQ ID NO: 1012 - DNA, 21 bp, synthetic construct
  source 1..21: mol_type = other DNA
  misc_feature 1..21: note = n-mer motif encoding polynucleotide
gcctacggtatacacgaagtg

SEQ ID NO: 1013 - DNA, 21 bp, synthetic construct
  misc_feature 1..21: note = n-mer motif encoding polynucleotide
  source 1..21: mol_type = other DNA
gcgatgctgcgtatggagcag

SEQ ID NO: 1014 - DNA, 21 bp, synthetic construct
  misc_feature 1..21: note = n-mer motif encoding polynucleotide
  source 1..21: mol_type = other DNA
aggcaggcgaatcagacgtat

SEQ ID NO: 1015 - DNA, 21 bp, synthetic construct
  source 1..21: mol_type = other DNA
  misc_feature 1..21: note = n-mer motif encoding polynucleotide
ttttctggtcaggcgttggct

SEQ ID NO: 1016 - DNA, 21 bp, synthetic construct
  source 1..21: mol_type = other DNA
  misc_feature 1..21: note = n-mer motif encoding polynucleotide
gataatgtgaattctcagcct

SEQ ID NO: 1017 - DNA, 21 bp, synthetic construct
  source 1..21: mol_type = other DNA
  misc_feature 1..21: note = n-mer motif encoding polynucleotide
gggttgcatgggacgagtaat

SEQ ID NO: 1018 - DNA, 21 bp, synthetic construct
  misc_feature 1..21: note = n-mer motif encoding polynucleotide
  source 1..21: mol_type = other DNA
gagagggagcctcctaagaat

SEQ ID NO: 1019 - DNA, 21 bp, synthetic construct
  source 1..21: mol_type = other DNA
  misc_feature 1..21: note = n-mer motif encoding polynucleotide
gtggtgacgcttgggatgctg

SEQ ID NO: 1020 - DNA, 21 bp, synthetic construct
  source 1..21: mol_type = other DNA
  misc_feature 1..21: note = n-mer motif encoding polynucleotide
cataataataatttgctgaat

SEQ ID NO: 1021 - DNA, 21 bp, synthetic construct
  source 1..21: mol_type = other DNA
  misc_feature 1..21: note = n-mer motif encoding polynucleotide
ttgattaatatgagtcagaat

SEQ ID NO: 1022 - DNA, 21 bp, synthetic construct
  misc_feature 1..21: note = n-mer motif encoding polynucleotide
  source 1..21: mol_type = other DNA
aatactaatgcgtcgtattct

SEQ ID NO: 1023 - DNA, 21 bp, synthetic construct
  source 1..21: mol_type = other DNA
  misc_feature 1..21: note = n-mer motif encoding polynucleotide
aggcttaatgcgggtgagcat

SEQ ID NO: 1024 - DNA, 21 bp, synthetic construct
  misc_feature 1..21: note = n-mer motif encoding polynucleotide
  source 1..21: mol_type = other DNA
gctgttattctgaatcctgtt

SEQ ID NO: 1025 - DNA, 21 bp, synthetic construct
  misc_feature 1..21: note = n-mer motif encoding polynucleotide
  source 1..21: mol_type = other DNA
ccgagtactcatgggtatgtt

SEQ ID NO: 1026 - DNA, 21 bp, synthetic construct
  source 1..21: mol_type = other DNA
  misc_feature 1..21: note = n-mer motif encoding polynucleotide
cttagggcgtctgtgtcggag

SEQ ID NO: 1027 - DNA, 21 bp, synthetic construct
  misc_feature 1..21: note = n-mer motif encoding polynucleotide
  source 1..21: mol_type = other DNA
atgatgacctctatgacgtta

SEQ ID NO: 1028 - DNA, 21 bp, synthetic construct
  source 1..21: mol_type = other DNA
  misc_feature 1..21: note = n-mer motif encoding polynucleotide
tcggcacacaacatagtatac

SEQ ID NO: 1029 - DNA, 21 bp, synthetic construct
  misc_feature 1..21: note = n-mer motif encoding polynucleotide
  source 1..21: mol_type = other DNA
cacgacagcacaacccgccca

SEQ ID NO: 1030 - DNA, 21 bp, synthetic construct
  source 1..21: mol_type = other DNA
  misc_feature 1..21: note = n-mer motif encoding polynucleotide
atcaaagactcgtaccttact

SEQ ID NO: 1031 - DNA, 21 bp, synthetic construct
  misc_feature 1..21: note = n-mer motif encoding polynucleotide
  source 1..21: mol_type = other DNA
tatacgcctgggcttactgag

SEQ ID NO: 1032 - DNA, 21 bp, synthetic construct
  misc_feature 1..21: note = n-mer motif encoding polynucleotide
  source 1..21: mol_type = other DNA
aagatgggtggttctcagagt

SEQ ID NO: 1033 - DNA, 21 bp, synthetic construct
  misc_feature 1..21: note = n-mer motif encoding polynucleotide
  source 1..21: mol_type = other DNA
tcacgtcaaacagcgctaaca

SEQ ID NO: 1034 - DNA, 21 bp, synthetic construct
  source 1..21: mol_type = other DNA
  misc_feature 1..21: note = n-mer motif encoding polynucleotide
gtagaaaccagcagattgtac

SEQ ID NO: 1035 - DNA, 21 bp, synthetic construct
  source 1..21: mol_type = other DNA
  misc_feature 1..21: note = n-mer motif encoding polynucleotide
aaatccaacaacggggaatac

SEQ ID NO: 1036 - DNA, 21 bp, synthetic construct
  source 1..21: mol_type = other DNA
  misc_feature 1..21: note = n-mer motif encoding polynucleotide
tcgggtgttcatagtgcgcgt

SEQ ID NO: 1037 - DNA, 21 bp, synthetic construct
  misc_feature 1..21: note = n-mer motif encoding polynucleotide
  source 1..21: mol_type = other DNA
cctaacaacgaaaaaaacccg

SEQ ID NO: 1038 - DNA, 21 bp, synthetic construct
  source 1..21: mol_type = other DNA
  misc_feature 1..21: note = n-mer motif encoding polynucleotide
actattggtgaggggtatcat

SEQ ID NO: 1039 - DNA, 21 bp, synthetic construct
  source 1..21: mol_type = other DNA
  misc_feature 1..21: note = n-mer motif encoding polynucleotide
ctgcagacttctgttgctact

SEQ ID NO: 1040 - DNA, 21 bp, synthetic construct
  misc_feature 1..21: note = n-mer motif encoding polynucleotide
  source 1..21: mol_type = other DNA
ctattgggaaacgcacccaca

SEQ ID NO: 1041 - DNA, 21 bp, synthetic construct
  misc_feature 1..21: note = n-mer motif encoding polynucleotide
  source 1..21: mol_type = other DNA
atttcggggtctcatttgaat

SEQ ID NO: 1042 - DNA, 21 bp, synthetic construct
  source 1..21: mol_type = other DNA
  misc_feature 1..21: note = n-mer motif encoding polynucleotide
aagtctcttagtagtgatgat

SEQ ID NO: 1043 - DNA, 21 bp, synthetic construct
  source 1..21: mol_type = other DNA
  misc_feature 1..21: note = n-mer motif encoding polynucleotide
acgaggactcaggggacgtct

SEQ ID NO: 1044 - DNA, 21 bp, synthetic construct
  source 1..21: mol_type = other DNA
  misc_feature 1..21: note = n-mer motif encoding polynucleotide
gttagtaggtctgggagtact

SEQ ID NO: 1045 - DNA, 21 bp, synthetic construct
  misc_feature 1..21: note = n-mer motif encoding polynucleotide
  source 1..21: mol_type = other DNA
agcgccgacacccggtccccc

SEQ ID NO: 1046 - DNA, 21 bp, synthetic construct
  source 1..21: mol_type = other DNA
  misc_feature 1..21: note = n-mer motif encoding polynucleotide
cgtgatactgctaatgggccg

SEQ ID NO: 1047 - DNA, 21 bp, synthetic construct
  misc_feature 1..21: note = n-mer motif encoding polynucleotide
  source 1..21: mol_type = other DNA
atgatgtctaacagcctcgcg

SEQ ID NO: 1048 - DNA, 21 bp, synthetic construct
  source 1..21: mol_type = other DNA
  misc_feature 1..21: note = n-mer motif encoding polynucleotide
actgggaggattgagcttagg

SEQ ID NO: 1049 - DNA, 21 bp, synthetic construct
  misc_feature 1..21: note = n-mer motif encoding polynucleotide
  source 1..21: mol_type = other DNA
gctaataatgcggctgcgtcg

SEQ ID NO: 1050 - DNA, 21 bp, synthetic construct
  source 1..21: mol_type = other DNA
  misc_feature 1..21: note = n-mer motif encoding polynucleotide
cagttgaatattaatgataag

SEQ ID NO: 1051 - DNA, 21 bp, synthetic construct
  source 1..21: mol_type = other DNA
  misc_feature 1..21: note = n-mer motif encoding polynucleotide
atggacggggctcacacgtca

SEQ ID NO: 1052 - DNA, 21 bp, synthetic construct
  source 1..21: mol_type = other DNA
  misc_feature 1..21: note = n-mer motif encoding polynucleotide
actagtgcgactgattcgatg

SEQ ID NO: 1053 - DNA, 21 bp, synthetic construct
  misc_feature 1..21: note = n-mer motif encoding polynucleotide
  source 1..21: mol_type = other DNA
gccgccagcttgtcgcaaagc

SEQ ID NO: 1054 - DNA, 21 bp, synthetic construct
  source 1..21: mol_type = other DNA
  misc_feature 1..21: note = n-mer motif encoding polynucleotide
tctcaggcgggtctgcttgtg

SEQ ID NO: 1055 - DNA, 21 bp, synthetic construct
  source 1..21: mol_type = other DNA
  misc_feature 1..21: note = n-mer motif encoding polynucleotide
acgacttattcggatctgagt

SEQ ID NO: 1056 - DNA, 21 bp, synthetic construct
  source 1..21: mol_type = other DNA
  misc_feature 1..21: note = n-mer motif encoding polynucleotide
ttctcctccggaacaaccata

SEQ ID NO: 1057 - DNA, 21 bp, synthetic construct
  source 1..21: mol_type = other DNA
  misc_feature 1..21: note = n-mer motif encoding polynucleotide
gtcttcacagaaatagaatcg

SEQ ID NO: 1058 - DNA, 21 bp, synthetic construct
  source 1..21: mol_type = other DNA
  misc_feature 1..21: note = n-mer motif encoding polynucleotide
gcagaccccgctaaaggcaaa

SEQ ID NO: 1059 - DNA, 21 bp, synthetic construct
  misc_feature 1..21: note = n-mer motif encoding polynucleotide
  source 1..21: mol_type = other DNA
aaagaatctgaatacagagtt

SEQ ID NO: 1060 - DNA, 21 bp, synthetic construct
  misc_feature 1..21: note = n-mer motif encoding polynucleotide
  source 1..21: mol_type = other DNA
gggatggtgtctcttaatagg

SEQ ID NO: 1061 - DNA, 21 bp, synthetic construct
  misc_feature 1..21: note = n-mer motif encoding polynucleotide
  source 1..21: mol_type = other DNA
accgttatcgaacgcaaagac

SEQ ID NO: 1062 - DNA, 21 bp, synthetic construct
  source 1..21: mol_type = other DNA
  misc_feature 1..21: note = n-mer motif encoding polynucleotide
aggattgatacgttgttggtg

SEQ ID NO: 1063 - DNA, 21 bp, synthetic construct
  misc_feature 1..21: note = n-mer motif encoding polynucleotide
  source 1..21: mol_type = other DNA
ggatccacaggcctacccccg

SEQ ID NO: 1064 - DNA, 21 bp, synthetic construct
  misc_feature 1..21: note = n-mer motif encoding polynucleotide
  source 1..21: mol_type = other DNA
atggagttgacttctactagt

SEQ ID NO: 1065 - DNA, 21 bp, synthetic construct
  misc_feature 1..21: note = n-mer motif encoding polynucleotide
  source 1..21: mol_type = other DNA
caaccaggagccccccaaacc

SEQ ID NO: 1066 - DNA, 21 bp, synthetic construct
  source 1..21: mol_type = other DNA
  misc_feature 1..21: note = n-mer motif encoding polynucleotide
aattcgatgggtaatgggggt

SEQ ID NO: 1067 - DNA, 21 bp, synthetic construct
  misc_feature 1..21: note = n-mer motif encoding polynucleotide
  source 1..21: mol_type = other DNA
ggtagtactaagtctgggcag

SEQ ID NO: 1068 - DNA, 21 bp, synthetic construct
  misc_feature 1..21: note = n-mer motif encoding polynucleotide
  source 1..21: mol_type = other DNA
acttttttgcctcagcttggg

SEQ ID NO: 1069 - DNA, 21 bp, synthetic construct
  source 1..21: mol_type = other DNA
  misc_feature 1..21: note = n-mer motif encoding polynucleotide
atgggaataaacgtactgagc

SEQ ID NO: 1070 - DNA, 21 bp, synthetic construct
  misc_feature 1..21: note = n-mer motif encoding polynucleotide
  source 1..21: mol_type = other DNA
gtgaatcttggtatttcgggg

SEQ ID NO: 1071 - DNA, 21 bp, synthetic construct
  misc_feature 1..21: note = n-mer motif encoding polynucleotide
  source 1..21: mol_type = other DNA
agtgagaatcgggctggtaat

SEQ ID NO: 1072 - DNA, 21 bp, synthetic construct
  source 1..21: mol_type = other DNA
  misc_feature 1..21: note = n-mer motif encoding polynucleotide
cactccaacgcgactacgata

SEQ ID NO: 1073 - DNA, 21 bp, synthetic construct
  source 1..21: mol_type = other DNA
  misc_feature 1..21: note = n-mer motif encoding polynucleotide
ccggggtcgtccgcttccatc

SEQ ID NO: 1074 - DNA, 21 bp, synthetic construct
  source 1..21: mol_type = other DNA
  misc_feature 1..21: note = n-mer motif encoding polynucleotide
attacgtcgttgaatgggatg

SEQ ID NO: 1075 - DNA, 21 bp, synthetic construct
  misc_feature 1..21: note = n-mer motif encoding polynucleotide
  source 1..21: mol_type = other DNA
tatctggagggtgctcatcgt

SEQ ID NO: 1076 - DNA, 21 bp, synthetic construct
  misc_feature 1..21: note = n-mer motif encoding polynucleotide
  source 1..21: mol_type = other DNA
aggcaggttgagcagtctgat

SEQ ID NO: 1077 - DNA, 21 bp, synthetic construct
  source 1..21: mol_type = other DNA
  misc_feature 1..21: note = n-mer motif encoding polynucleotide
agctctcaaagttccgggtcg

SEQ ID NO: 1078 - DNA, 21 bp, synthetic construct
  source 1..21: mol_type = other DNA
  misc_feature 1..21: note = n-mer motif encoding polynucleotide
cagcttactgttgggaagccg

SEQ ID NO: 1079 - DNA, 21 bp, synthetic construct
  source 1..21: mol_type = other DNA
  misc_feature 1..21: note = n-mer motif encoding polynucleotide
gttgtgcattcgagtattact

SEQ ID NO: 1080 - DNA, 21 bp, synthetic construct
  source 1..21: mol_type = other DNA
  misc_feature 1..21: note = n-mer motif encoding polynucleotide
ctagaacaactacgggtccca

SEQ ID NO: 1081 - DNA, 21 bp, synthetic construct
  misc_feature 1..21: note = n-mer motif encoding polynucleotide
  source 1..21: mol_type = other DNA
cagcattctccgaagccggtt

SEQ ID NO: 1082 - DNA, 21 bp, synthetic construct
  source 1..21: mol_type = other DNA
  misc_feature 1..21: note = n-mer motif encoding polynucleotide
gcgggcagttcgccatcacgc

SEQ ID NO: 1083 - DNA, 21 bp, synthetic construct
  source 1..21: mol_type = other DNA
  misc_feature 1..21: note = n-mer motif encoding polynucleotide
ggagtaacaatcggtagcagg

SEQ ID NO: 1084 - DNA, 21 bp, synthetic construct
  misc_feature 1..21: note = n-mer motif encoding polynucleotide
  source 1..21: mol_type = other DNA
tacatcgcgggaggcgaccaa

SEQ ID NO: 1085 - DNA, 21 bp, synthetic construct
  source 1..21: mol_type = other DNA
  misc_feature 1..21: note = n-mer motif encoding polynucleotide
attagtagtgagaggttttct

SEQ ID NO: 1086 - DNA, 21 bp, synthetic construct
  source 1..21: mol_type = other DNA
  misc_feature 1..21: note = n-mer motif encoding polynucleotide
aggagtgagggtaatcatgct

SEQ ID NO: 1087 - DNA, 21 bp, synthetic construct
  source 1..21: mol_type = other DNA
  misc_feature 1..21: note = n-mer motif encoding polynucleotide
gagaaggggaatagtggggtt

SEQ ID NO: 1088 - DNA, 21 bp, synthetic construct
  misc_feature 1..21: note = n-mer motif encoding polynucleotide
  source 1..21: mol_type = other DNA
tacatagttgaccacgctaac

SEQ ID NO: 1089 - DNA, 21 bp, synthetic construct
  misc_feature 1..21: note = n-mer motif encoding polynucleotide
  source 1..21: mol_type = other DNA
cgtcggttgagtacggatctt

SEQ ID NO: 1090 - DNA, 21 bp, synthetic construct
  misc_feature 1..21: note = n-mer motif encoding polynucleotide
  source 1..21: mol_type = other DNA
gcgaatagtaggcttggggcg

SEQ ID NO: 1091 - DNA, 21 bp, synthetic construct
  misc_feature 1..21: note = n-mer motif encoding polynucleotide
  source 1..21: mol_type = other DNA
ggtactgctgagaatacgagt

SEQ ID NO: 1092 - DNA, 21 bp, synthetic construct
  misc_feature 1..21: note = n-mer motif encoding polynucleotide
  source 1..21: mol_type = other DNA
gtgagggatgttgctaaggag

SEQ ID NO: 1093 - DNA, 21 bp, synthetic construct
  source 1..21: mol_type = other DNA
  misc_feature 1..21: note = n-mer motif encoding polynucleotide
ggaggccttaccaacggtcta

SEQ ID NO: 1094 - DNA, 21 bp, synthetic construct
  source 1..21: mol_type = other DNA
  misc_feature 1..21: note = n-mer motif encoding polynucleotide
ccttcgattccgtcgttttcg

SEQ ID NO: 1095 - DNA, 21 bp, synthetic construct
  misc_feature 1..21: note = n-mer motif encoding polynucleotide
  source 1..21: mol_type = other DNA
aacgctctcctcaacgcacct

SEQ ID NO: 1096 - DNA, 21 bp, synthetic construct
  misc_feature 1..21: note = n-mer motif encoding polynucleotide
  source 1..21: mol_type = other DNA
gacgacatggtcaaaaactca

SEQ ID NO: 1097 - DNA, 21 bp, synthetic construct
  misc_feature 1..21: note = n-mer motif encoding polynucleotide
  source 1..21: mol_type = other DNA
actgcgaatacgcatgctctg

SEQ ID NO: 1098 - DNA, 21 bp, synthetic construct
  misc_feature 1..21: note = n-mer motif encoding polynucleotide
  source 1..21: mol_type = other DNA
gtatacgccaccgcactcgca

SEQ ID NO: 1099 - DNA, 21 bp, synthetic construct
  source 1..21: mol_type = other DNA
  misc_feature 1..21: note = n-mer motif encoding polynucleotide
ggtatatacccggcatccacc

SEQ ID NO: 1100 - DNA, 21 bp, synthetic construct
  source 1..21: mol_type = other DNA
  misc_feature 1..21: note = n-mer motif encoding polynucleotide
ggttttgatggtaagcagctt

SEQ ID NO: 1101 - DNA, 21 bp, synthetic construct
  source 1..21: mol_type = other DNA
  misc_feature 1..21: note = n-mer motif encoding polynucleotide
cactctatgtccgcaaacacc

SEQ ID NO: 1102 - DNA, 21 bp, synthetic construct
  source 1..21: mol_type = other DNA
  misc_feature 1..21: note = n-mer motif encoding polynucleotide
tggagcatcaaaaaccaaaca

SEQ ID NO: 1103 - DNA, 21 bp, synthetic construct
  source 1..21: mol_type = other DNA
  misc_feature 1..21: note = n-mer motif encoding polynucleotide
accctccacaccaaagaccta

SEQ ID NO: 1104 - DNA, 21 bp, synthetic construct
  source 1..21: mol_type = other DNA
  misc_feature 1..21: note = n-mer motif encoding polynucleotide
tcttatggtaatactcatgat

SEQ ID NO: 1105 - DNA, 21 bp, synthetic construct
  misc_feature 1..21: note = n-mer motif encoding polynucleotide
  source 1..21: mol_type = other DNA
cagtcggggtctctggtgccg

SEQ ID NO: 1106 - DNA, 21 bp, synthetic construct
  misc_feature 1..21: note = n-mer motif encoding polynucleotide
  source 1..21: mol_type = other DNA
aatactttgcagaatagtcat

SEQ ID NO: 1107 - DNA, 21 bp, synthetic construct
  source 1..21: mol_type = other DNA
  misc_feature 1..21: note = n-mer motif encoding polynucleotide
acggctgagtctagtcatccg

SEQ ID NO: 1108 - DNA, 21 bp, synthetic construct
  misc_feature 1..21: note = n-mer motif encoding polynucleotide
  source 1..21: mol_type = other DNA
gcctctacagtctcactctac

SEQ ID NO: 1109 - DNA, 21 bp, synthetic construct
  misc_feature 1..21: note = n-mer motif encoding polynucleotide
  source 1..21: mol_type = other DNA
ctgactgctgttgcgattagt

SEQ ID NO: 1110 - DNA, 21 bp, synthetic construct
  misc_feature 1..21: note = n-mer motif encoding polynucleotide
  source 1..21: mol_type = other DNA
gtctcgggacaaagtgcgtac

SEQ ID NO: 1111 - DNA, 21 bp, synthetic construct
  source 1..21: mol_type = other DNA
  misc_feature 1..21: note = n-mer motif encoding polynucleotide
ggtgaaactaacttcccaact

SEQ ID NO: 1112 - DNA, 21 bp, synthetic construct
  source 1..21: mol_type = other DNA
  misc_feature 1..21: note = n-mer motif encoding polynucleotide
aatgataataggtcgatgaat

SEQ ID NO: 1113 - DNA, 21 bp, synthetic construct
  misc_feature 1..21: note = n-mer motif encoding polynucleotide
  source 1..21: mol_type = other DNA
cgatcaggcgaccctaaaaac

SEQ ID NO: 1114 - DNA, 21 bp, synthetic construct
  source 1..21: mol_type = other DNA
  misc_feature 1..21: note = n-mer motif encoding polynucleotide
tgggagagtgataagtttcgt

SEQ ID NO: 1115 - DNA, 21 bp, synthetic construct
  source 1..21: mol_type = other DNA
  misc_feature 1..21: note = n-mer motif encoding polynucleotide
caggttaatcataatactagt

SEQ ID NO: 1116 - DNA, 21 bp, synthetic construct
  misc_feature 1..21: note = n-mer motif encoding polynucleotide
  source 1..21: mol_type = other DNA
gggtggtcgaacaacgaacta

SEQ ID NO: 1117 - DNA, 21 bp, synthetic construct
  misc_feature 1..21: note = n-mer motif encoding polynucleotide
  source 1..21: mol_type = other DNA
cgggctgtgcttgcgactaat

SEQ ID NO: 1118 - DNA, 21 bp, synthetic construct
  source 1..21: mol_type = other DNA
  misc_feature 1..21: note = n-mer motif encoding polynucleotide
catatgggtttgaatgagctt

SEQ ID NO: 1119 - DNA, 21 bp, synthetic construct
  misc_feature 1..21: note = n-mer motif encoding polynucleotide
  source 1..21: mol_type = other DNA
ggagaaagctcctcaataagc

SEQ ID NO: 1120 - DNA, 21 bp, synthetic construct
  source 1..21: mol_type = other DNA
  misc_feature 1..21: note = n-mer motif encoding polynucleotide
atacacaaatctagcgtcgaa

SEQ ID NO: 1121 - DNA, 21 bp, synthetic construct
  misc_feature 1..21: note = n-mer motif encoding polynucleotide
  source 1..21: mol_type = other DNA
atgtccggatccatgatatca

SEQ ID NO: 1122 - DNA, 21 bp, synthetic construct
  misc_feature 1..21: note = n-mer motif encoding polynucleotide
  source 1..21: mol_type = other DNA
ttgagtctggctgggaatagg

SEQ ID NO: 1123 - DNA, 21 bp, synthetic construct
  source 1..21: mol_type = other DNA
  misc_feature 1..21: note = n-mer motif encoding polynucleotide
tctgcaacaacgaaccacgga

SEQ ID NO: 1124 - DNA, 21 bp, synthetic construct
  source 1..21: mol_type = other DNA
  misc_feature 1..21: note = n-mer motif encoding polynucleotide
tctacggagtctaatgctagt

SEQ ID NO: 1125 - DNA, 21 bp, synthetic construct
  misc_feature 1..21: note = n-mer motif encoding polynucleotide
  source 1..21: mol_type = other DNA
ccgattgctgagaggccttct

SEQ ID NO: 1126 - DNA, 21 bp, synthetic construct
  source 1..21: mol_type = other DNA
  misc_feature 1..21: note = n-mer motif encoding polynucleotide
ttacttccaaacaacacccac

SEQ ID NO: 1127 - DNA, 21 bp, synthetic construct
  source 1..21: mol_type = other DNA
  misc_feature 1..21: note = n-mer motif encoding polynucleotide
gggactcttaagaaggatgcg

SEQ ID NO: 1128 - DNA, 21 bp, synthetic construct
  misc_feature 1..21: note = n-mer motif encoding polynucleotide
  source 1..21: mol_type = other DNA
gctcttgagaatcggagtctg

SEQ ID NO: 1129 - DNA, 21 bp, synthetic construct
  source 1..21: mol_type = other DNA
  misc_feature 1..21: note = n-mer motif encoding polynucleotide
accaccgggaactccacgatg

SEQ ID NO: 1130 - DNA, 21 bp, synthetic construct
  misc_feature 1..21: note = n-mer motif encoding polynucleotide
  source 1..21: mol_type = other DNA
gtgtatgatagtgcgcctaat

SEQ ID NO: 1131 - DNA, 21 bp, synthetic construct
  misc_feature 1..21: note = n-mer motif encoding polynucleotide
  source 1..21: mol_type = other DNA
ctactatctaaaggggactcc

SEQ ID NO: 1132 - DNA, 21 bp, synthetic construct
  misc_feature 1..21: note = n-mer motif encoding polynucleotide
  source 1..21: mol_type = other DNA
tcttacgccataaaccaatca

SEQ ID NO: 1133 - DNA, 21 bp, synthetic construct
  source 1..21: mol_type = other DNA
  misc_feature 1..21: note = n-mer motif encoding polynucleotide
ggaggaggggaacgttccacg

SEQ ID NO: 1134 - DNA, 21 bp, synthetic construct
  source 1..21: mol_type = other DNA
  misc_feature 1..21: note = n-mer motif encoding polynucleotide
attcaggttagtggtagtcag

SEQ ID NO: 1135 - DNA, 21 bp, synthetic construct
  misc_feature 1..21: note = n-mer motif encoding polynucleotide
  source 1..21: mol_type = other DNA
tatcctgtttcgctttcgccg

SEQ ID NO: 1136 - DNA, 21 bp, synthetic construct
  misc_feature 1..21: note = n-mer motif encoding polynucleotide
  source 1..21: mol_type = other DNA
gagttgggtaataagacggct

SEQ ID NO: 1137 - DNA, 21 bp, synthetic construct
  misc_feature 1..21: note = n-mer motif encoding polynucleotide
  source 1..21: mol_type = other DNA
tcgggggtaaacttcggagta

SEQ ID NO: 1138 - DNA, 21 bp, synthetic construct
  misc_feature 1..21: note = n-mer motif encoding polynucleotide
  source 1..21: mol_type = other DNA
gcgtggagttcgccgagtggg

SEQ ID NO: 1139 - DNA, 21 bp, synthetic construct
  misc_feature 1..21: note = n-mer motif encoding polynucleotide
  source 1..21: mol_type = other DNA
ggtgtgaattatcatactacg

SEQ ID NO: 1140 - DNA, 21 bp, synthetic construct
  misc_feature 1..21: note = n-mer motif encoding polynucleotide
  source 1..21: mol_type = other DNA
ctgattggggagcttaagatg

SEQ ID NO: 1141 - DNA, 21 bp, synthetic construct
  misc_feature 1..21: note = n-mer motif encoding polynucleotide
  source 1..21: mol_type = other DNA
tatctgaatagtaagcagctt

SEQ ID NO: 1142 - DNA, 21 bp, synthetic construct
  source 1..21: mol_type = other DNA
  misc_feature 1..21: note = n-mer motif encoding polynucleotide
actgttgataggccgattgtg

SEQ ID NO: 1143 - DNA, 21 bp, synthetic construct
  source 1..21: mol_type = other DNA
  misc_feature 1..21: note = n-mer motif encoding polynucleotide
gtcagcaaaaccaaagactcg

SEQ ID NO: 1144 - DNA, 21 bp, synthetic construct
  source 1..21: mol_type = other DNA
  misc_feature 1..21: note = n-mer motif encoding polynucleotide
caagctgggaacgcgccaagg

SEQ ID NO: 1145 - DNA, 21 bp, synthetic construct
  source 1..21: mol_type = other DNA
  misc_feature 1..21: note = n-mer motif encoding polynucleotide
caagaccaaacgagcaaccgt

SEQ ID NO: 1146 - DNA, 21 bp, synthetic construct
  misc_feature 1..21: note = n-mer motif encoding polynucleotide
  source 1..21: mol_type = other DNA
gatactacgtatcggaatact

SEQ ID NO: 1147 - DNA, 21 bp, synthetic construct
  misc_feature 1..21: note = n-mer motif encoding polynucleotide
  source 1..21: mol_type = other DNA
gggacaaccgaagttaacaaa

SEQ ID NO: 1148 - DNA, 21 bp, synthetic construct
  misc_feature 1..21: note = n-mer motif encoding polynucleotide
  source 1..21: mol_type = other DNA
gggtttactaatacgagtaag

SEQ ID NO: 1149 - DNA, 21 bp, synthetic construct
  source 1..21: mol_type = other DNA
  misc_feature 1..21: note = n-mer motif encoding polynucleotide
gtgcagaagaatgatgtgctt

SEQ ID NO: 1150 - DNA, 21 bp, synthetic construct
  source 1..21: mol_type = other DNA
  misc_feature 1..21: note = n-mer motif encoding polynucleotide
agcgtcaacaacatgcgactc

SEQ ID NO: 1151 - DNA, 21 bp, synthetic construct
  source 1..21: mol_type = other DNA
  misc_feature 1..21: note = n-mer motif encoding polynucleotide
ttcagtgccgccttaccgtta

SEQ ID NO: 1152 - DNA, 21 bp, synthetic construct
  misc_feature 1..21: note = n-mer motif encoding polynucleotide
  source 1..21: mol_type = other DNA
gacgtcccaaacaacaaaagg

SEQ ID NO: 1153 - DNA, 21 bp, synthetic construct
  misc_feature 1..21: note = n-mer motif encoding polynucleotide
  source 1..21: mol_type = other DNA
ggtgagactatgcgtcataat

SEQ ID NO: 1154 - DNA, 21 bp, synthetic construct
  misc_feature 1..21: note = n-mer motif encoding polynucleotide
  source 1..21: mol_type = other DNA
attcggacttctgtgattaat

SEQ ID NO: 1155 - DNA, 21 bp, synthetic construct
  misc_feature 1..21: note = n-mer motif encoding polynucleotide
  source 1..21: mol_type = other DNA
ccgcgtgctcctggtcataat

SEQ ID NO: 1156 - DNA, 21 bp, synthetic construct
  source 1..21: mol_type = other DNA
  misc_feature 1..21: note = n-mer motif encoding polynucleotide
agtgttgcgcatcctttgtct

SEQ ID NO: 1157 - DNA, 21 bp, synthetic construct
  misc_feature 1..21: note = n-mer motif encoding polynucleotide
  source 1..21: mol_type = other DNA
atgacaataaccgtcgaaccg

SEQ ID NO: 1158 - DNA, 21 bp, synthetic construct
  source 1..21: mol_type = other DNA
  misc_feature 1..21: note = n-mer motif encoding polynucleotide
ccattaaacgcgaacggctcc

SEQ ID NO: 1159 - DNA, 21 bp, synthetic construct
  misc_feature 1..21: note = n-mer motif encoding polynucleotide
  source 1..21: mol_type = other DNA
aataggcagcgggattttgag

SEQ ID NO: 1160 - DNA, 21 bp, synthetic construct
  misc_feature 1..21: note = n-mer motif encoding polynucleotide
  source 1..21: mol_type = other DNA
gatattcataatccgcgtacg

SEQ ID NO: 1161 - DNA, 21 bp, synthetic construct
  source 1..21: mol_type = other DNA
  misc_feature 1..21: note = n-mer motif encoding polynucleotide
tggatagcaggaaaccactcc

SEQ ID NO: 1162 - DNA, 21 bp, synthetic construct
  source 1..21: mol_type = other DNA
  misc_feature 1..21: note = n-mer motif encoding polynucleotide
tctactcatcatgctgatcgt

SEQ ID NO: 1163 - DNA, 21 bp, synthetic construct
  source 1..21: mol_type = other DNA
  misc_feature 1..21: note = n-mer motif encoding polynucleotide
ccggaatccgccgccaaaagc

SEQ ID NO: 1164 - DNA, 21 bp, synthetic construct
  source 1..21: mol_type = other DNA
  misc_feature 1..21: note = n-mer motif encoding polynucleotide
cactccgacaaagtctcctca

SEQ ID NO: 1165 - DNA, 21 bp, synthetic construct
  source 1..21: mol_type = other DNA
  misc_feature 1..21: note = n-mer motif encoding polynucleotide
tcaaacagcgccgacgcgggg

SEQ ID NO: 1166 - DNA, 21 bp, synthetic construct
  source 1..21: mol_type = other DNA
  misc_feature 1..21: note = n-mer motif encoding polynucleotide
gagtttcagaggattcgtgag

SEQ ID NO: 1167 - DNA, 21 bp, synthetic construct
  source 1..21: mol_type = other DNA
  misc_feature 1..21: note = n-mer motif encoding polynucleotide
tccgcggggatgacattggac

SEQ ID NO: 1168 - DNA, 21 bp, synthetic construct
  source 1..21: mol_type = other DNA
  misc_feature 1..21: note = n-mer motif encoding polynucleotide
actcaaacttctacctggacc

SEQ ID NO: 1169 - DNA, 21 bp, synthetic construct
  source 1..21: mol_type = other DNA
  misc_feature 1..21: note = n-mer motif encoding polynucleotide
acgacactaacgcaaacggac

SEQ ID NO: 1170 - DNA, 21 bp, synthetic construct
  source 1..21: mol_type = other DNA
  misc_feature 1..21: note = n-mer motif encoding polynucleotide
gcctcgaaaggcttcggccac

SEQ ID NO: 1171 - DNA, 21 bp, synthetic construct
  source 1..21: mol_type = other DNA
  misc_feature 1..21: note = n-mer motif encoding polynucleotide
ccggctacgatgattagtgag

SEQ ID NO: 1172 - DNA, 21 bp, synthetic construct
  source 1..21: mol_type = other DNA
  misc_feature 1..21: note = n-mer motif encoding polynucleotide
actgactcatctgcagactcc

SEQ ID NO: 1173 - DNA, 21 bp, synthetic construct
  source 1..21: mol_type = other DNA
  misc_feature 1..21: note = n-mer motif encoding polynucleotide
tcaaccagaaaagaacacgac

SEQ ID NO: 1174 - DNA, 21 bp, synthetic construct
  source 1..21: mol_type = other DNA
  misc_feature 1..21: note = n-mer motif encoding polynucleotide
ggtgatatttcttatagggtt

SEQ ID NO: 1175 - DNA, 21 bp, synthetic construct
  source 1..21: mol_type = other DNA
  misc_feature 1..21: note = n-mer motif encoding polynucleotide
atggggtatgttgatagtctg

SEQ ID NO: 1176 - DNA, 21 bp, synthetic construct
  source 1..21: mol_type = other DNA
  misc_feature 1..21: note = n-mer motif encoding polynucleotide
caaaccatcacctcacaaatg

SEQ ID NO: 1177 - DNA, 21 bp, synthetic construct
  source 1..21: mol_type = other DNA
  misc_feature 1..21: note = n-mer motif encoding polynucleotide
tcgattgggtattcgcctccg

SEQ ID NO: 1178 - DNA, 21 bp, synthetic construct
  misc_feature 1..21: note = n-mer motif encoding polynucleotide
  source 1..21: mol_type = other DNA
tcatccccagactcgtacaga

SEQ ID NO: 1179 - DNA, 21 bp, synthetic construct
  misc_feature 1..21: note = n-mer motif encoding polynucleotide
  source 1..21: mol_type = other DNA
attagtccgagtgcttctaat

SEQ ID NO: 1180 - DNA, 21 bp, synthetic construct
  source 1..21: mol_type = other DNA
  misc_feature 1..21: note = n-mer motif encoding polynucleotide
tatccggctgatcatcggact

SEQ ID NO: 1181 - DNA, 21 bp, synthetic construct
  source 1..21: mol_type = other DNA
  misc_feature 1..21: note = n-mer motif encoding polynucleotide
cacaccggccaaacaccatca

SEQ ID NO: 1182 - DNA, 21 bp, synthetic construct
  misc_feature 1..21: note = n-mer motif encoding polynucleotide
  source 1..21: mol_type = other DNA
cagacgactattctggctgct

SEQ ID NO: 1183 - DNA, 21 bp, synthetic construct
  misc_feature 1..21: note = n-mer motif encoding polynucleotide
  source 1..21: mol_type = other DNA
gatggtacgaggcaggttcat

SEQ ID NO: 1184 - DNA, 21 bp, synthetic construct
  source 1..21: mol_type = other DNA
  misc_feature 1..21: note = n-mer motif encoding polynucleotide
aggagtagtcctgcgacgaat

SEQ ID NO: 1185 - DNA, 21 bp, synthetic construct
  source 1..21: mol_type = other DNA
  misc_feature 1..21: note = n-mer motif encoding polynucleotide
gcgatgagtcatacgtataag

SEQ ID NO: 1186 - DNA, 21 bp, synthetic construct
  misc_feature 1..21: note = n-mer motif encoding polynucleotide
  source 1..21: mol_type = other DNA
atggcggctccgccggagcat

SEQ ID NO: 1187 - DNA, 21 bp, synthetic construct
  source 1..21: mol_type = other DNA
  misc_feature 1..21: note = n-mer motif encoding polynucleotide
ggtcctagtacttcggaggcg

SEQ ID NO: 1188 - DNA, 21 bp, synthetic construct
  source 1..21: mol_type = other DNA
  misc_feature 1..21: note = n-mer motif encoding polynucleotide
cataatcatgataggtcgtct

SEQ ID NO: 1189 - DNA, 21 bp, synthetic construct
  source 1..21: mol_type = other DNA
  misc_feature 1..21: note = n-mer motif encoding polynucleotide
gtggtcccatcgacccaagca

SEQ ID NO: 1190 - DNA, 21 bp, synthetic construct
  misc_feature 1..21: note = n-mer motif encoding polynucleotide
  source 1..21: mol_type = other DNA
attcctgtgactactcgtaat

SEQ ID NO: 1191 - DNA, 21 bp, synthetic construct
  source 1..21: mol_type = other DNA
  misc_feature 1..21: note = n-mer motif encoding polynucleotide
aaccaactcgtacgcgggaca

SEQ ID NO: 1192 - DNA, 21 bp, synthetic construct
  misc_feature 1..21: note = n-mer motif encoding polynucleotide
  source 1..21: mol_type = other DNA
gggtttgcgcttacgggtacg

SEQ ID NO: 1193 - DNA, 21 bp, synthetic construct
  source 1..21: mol_type = other DNA
  misc_feature 1..21: note = n-mer motif encoding polynucleotide
tctaagggtggtgatatggtg

SEQ ID NO: 1194 - DNA, 21 bp, synthetic construct
  misc_feature 1..21: note = n-mer motif encoding polynucleotide
  source 1..21: mol_type = other DNA
gctcgaccaggccaatctatg

SEQ ID NO: 1195 - DNA, 21 bp, synthetic construct
  source 1..21: mol_type = other DNA
  misc_feature 1..21: note = n-mer motif encoding polynucleotide
aaagcagactacgaatcctcc

SEQ ID NO: 1196 - DNA, 21 bp, synthetic construct
  source 1..21: mol_type = other DNA
  misc_feature 1..21: note = n-mer motif encoding polynucleotide
ggaccaagttcgcacatcgtt

SEQ ID NO: 1197 - DNA, 21 bp, synthetic construct
  source 1..21: mol_type = other DNA
  misc_feature 1..21: note = n-mer motif encoding polynucleotide
gaagttgtcaaaaccacgcac

SEQ ID NO: 1198 - DNA, 21 bp, synthetic construct
  source 1..21: mol_type = other DNA
  misc_feature 1..21: note = n-mer motif encoding polynucleotide
actttggataataatcattct

SEQ ID NO: 1199 - DNA, 21 bp, synthetic construct
  misc_feature 1..21: note = n-mer motif encoding polynucleotide
  source 1..21: mol_type = other DNA
acgatttataatatgggtccg

SEQ ID NO: 1200 - DNA, 21 bp, synthetic construct
  source 1..21: mol_type = other DNA
  misc_feature 1..21: note = n-mer motif encoding polynucleotide
tctaccatgaacacgatcacg

SEQ ID NO: 1201 - DNA, 21 bp, synthetic construct
  source 1..21: mol_type = other DNA
  misc_feature 1..21: note = n-mer motif encoding polynucleotide
acgctggcgcggactactgag

SEQ ID NO: 1202 - DNA, 21 bp, synthetic construct
  source 1..21: mol_type = other DNA
  misc_feature 1..21: note = n-mer motif encoding polynucleotide
ttgatttcttcgcagacttct

SEQ ID NO: 1203 - DNA, 21 bp, synthetic construct
  source 1..21: mol_type = other DNA
  misc_feature 1..21: note = n-mer motif encoding polynucleotide
cagactgcgtctggtgatact

SEQ ID NO: 1204 - DNA, 21 bp, synthetic construct
  misc_feature 1..21: note = n-mer motif encoding polynucleotide
  source 1..21: mol_type = other DNA
gcgcatggtgcttttccggtt

SEQ ID NO: 1205 - DNA, 21 bp, synthetic construct
  source 1..21: mol_type = other DNA
  misc_feature 1..21: note = n-mer motif encoding polynucleotide
ggggagacgcggtcgactgct

SEQ ID NO: 1206 - DNA, 21 bp, synthetic construct
  source 1..21: mol_type = other DNA
  misc_feature 1..21: note = n-mer motif encoding polynucleotide
aacaactacgcctactccgct

SEQ ID NO: 1207 - DNA, 21 bp, synthetic construct
  source 1..21: mol_type = other DNA
  misc_feature 1..21: note = n-mer motif encoding polynucleotide
gaggcttatcagactgagaag

SEQ ID NO: 1208 - DNA, 21 bp, synthetic construct
  misc_feature 1..21: note = n-mer motif encoding polynucleotide
  source 1..21: mol_type = other DNA
tctctagcacacgccgtaagc

SEQ ID NO: 1209 - DNA, 21 bp, synthetic construct
  misc_feature 1..21: note = n-mer motif encoding polynucleotide
  source 1..21: mol_type = other DNA
acgtatcagttgagtgggaat

SEQ ID NO: 1210 - DNA, 21 bp, synthetic construct
  source 1..21: mol_type = other DNA
  misc_feature 1..21: note = n-mer motif encoding polynucleotide
atgagcgaaaggttgcggata

SEQ ID NO: 1211 - DNA, 21 bp, synthetic construct
  source 1..21: mol_type = other DNA
  misc_feature 1..21: note = n-mer motif encoding polynucleotide
gggtcggggaaagacccaggg

SEQ ID NO: 1212 - DNA, 21 bp, synthetic construct
  source 1..21: mol_type = other DNA
  misc_feature 1..21: note = n-mer motif encoding polynucleotide
tacaacagcaacgcttctgta

SEQ ID NO: 1213 - DNA, 21 bp, synthetic construct
  misc_feature 1..21: note = n-mer motif encoding polynucleotide
  source 1..21: mol_type = other DNA
acgaggggtgatatggagttt

SEQ ID NO: 1214 - DNA, 21 bp, synthetic construct
  misc_feature 1..21: note = n-mer motif encoding polynucleotide
  source 1..21: mol_type = other DNA
ggaatcaccggaagccccggc

SEQ ID NO: 1215 - DNA, 21 bp, synthetic construct
  misc_feature 1..21: note = n-mer motif encoding polynucleotide
  source 1..21: mol_type = other DNA
caacacaccgcccaccccatg

SEQ ID NO: 1216 - DNA, 21 bp, synthetic construct
  source 1..21: mol_type = other DNA
  misc_feature 1..21: note = n-mer motif encoding polynucleotide
gatacggcgaatcgttcgact

SEQ ID NO: 1217 - DNA, 21 bp, synthetic construct
  source 1..21: mol_type = other DNA
  misc_feature 1..21: note = n-mer motif encoding polynucleotide
tcggcacacgacgcaagacta

SEQ ID NO: 1218 - DNA, 21 bp, synthetic construct
  source 1..21: mol_type = other DNA
  misc_feature 1..21: note = n-mer motif encoding polynucleotide
cttaatcatactctggggcat

SEQ ID NO: 1219 - DNA, 21 bp, synthetic construct
  source 1..21: mol_type = other DNA
  misc_feature 1..21: note = n-mer motif encoding polynucleotide
gggtttgagacgagtagtcct

SEQ ID NO: 1220 - DNA, 21 bp, synthetic construct
  misc_feature 1..21: note = n-mer motif encoding polynucleotide
  source 1..21: mol_type = other DNA
ggtacgagtgcggagagtcgg

SEQ ID NO: 1221 - DNA, 21 bp, synthetic construct
  misc_feature 1..21: note = n-mer motif encoding polynucleotide
  source 1..21: mol_type = other DNA
catgctaattatgttgaggtg

SEQ ID NO: 1222 - DNA, 21 bp, synthetic construct
  misc_feature 1..21: note = n-mer motif encoding polynucleotide
  source 1..21: mol_type = other DNA
acaacgaaaccggtcgcggaa

SEQ ID NO: 1223 - DNA, 21 bp, synthetic construct
  source 1..21: mol_type = other DNA
  misc_feature 1..21: note = n-mer motif encoding polynucleotide
tcgaccgccgttactaactca

SEQ ID NO: 1224 - DNA, 21 bp, synthetic construct
  source 1..21: mol_type = other DNA
  misc_feature 1..21: note = n-mer motif encoding polynucleotide
ctggggcttgctggtcaggtt

SEQ ID NO: 1225 - DNA, 21 bp, synthetic construct
  misc_feature 1..21: note = n-mer motif encoding polynucleotide
  source 1..21: mol_type = other DNA
gtgcttaagggtacgtttccg

SEQ ID NO: 1226 - DNA, 21 bp, synthetic construct
  source 1..21: mol_type = other DNA
  misc_feature 1..21: note = n-mer motif encoding polynucleotide
atgaatgagcctggtaggacg

SEQ ID NO: 1227 - DNA, 21 bp, synthetic construct
  misc_feature 1..21: note = n-mer motif encoding polynucleotide
  source 1..21: mol_type = other DNA
acttctgatcctttgaggaat

SEQ ID NO: 1228 - DNA, 21 bp, synthetic construct
  misc_feature 1..21: note = n-mer motif encoding polynucleotide
  source 1..21: mol_type = other DNA
cgtgatactaatacggataag

SEQ ID NO: 1229 - DNA, 21 bp, synthetic construct
  misc_feature 1..21: note = n-mer motif encoding polynucleotide
  source 1..21: mol_type = other DNA
gagtctgatttgcgtcagcgg

SEQ ID NO: 1230 - DNA, 21 bp, synthetic construct
  source 1..21: mol_type = other DNA
  misc_feature 1..21: note = n-mer motif encoding polynucleotide
tccggaatggccggcctttcc

SEQ ID NO: 1231 - DNA, 21 bp, synthetic construct
  source 1..21: mol_type = other DNA
  misc_feature 1..21: note = n-mer motif encoding polynucleotide
atagcaacaacgtctgggcgg

SEQ ID NO: 1232 - DNA, 21 bp, synthetic construct
  source 1..21: mol_type = other DNA
  misc_feature 1..21: note = n-mer motif encoding polynucleotide
acgattaggagtgagggtttt

SEQ ID NO: 1233 - DNA, 21 bp, synthetic construct
  source 1..21: mol_type = other DNA
  misc_feature 1..21: note = n-mer motif encoding polynucleotide
ggtctgtctattactattgcg

SEQ ID NO: 1234 - DNA, 21 bp, synthetic construct
  misc_feature 1..21: note = n-mer motif encoding polynucleotide
  source 1..21: mol_type = other DNA
ccgcctactaatgggcgtatg

SEQ ID NO: 1235 - DNA, 21 bp, synthetic construct
  source 1..21: mol_type = other DNA
  misc_feature 1..21: note = n-mer motif encoding polynucleotide
ctacaagaccgggcaacgaac

SEQ ID NO: 1236 - DNA, 21 bp, synthetic construct
  misc_feature 1..21: note = n-mer motif encoding polynucleotide
  source 1..21: mol_type = other DNA
cttaaatcgaccggtgaccac

SEQ ID NO: 1237 - DNA, 21 bp, synthetic construct
  misc_feature 1..21: note = n-mer motif encoding polynucleotide
  source 1..21: mol_type = other DNA
gataataataatcaggtttat

SEQ ID NO: 1238 - DNA, 21 bp, synthetic construct
  misc_feature 1..21: note = n-mer motif encoding polynucleotide
  source 1..21: mol_type = other DNA
gtgcatatggagtcgtatgcg

SEQ ID NO: 1239 - DNA, 21 bp, synthetic construct
  source 1..21: mol_type = other DNA
  misc_feature 1..21: note = n-mer motif encoding polynucleotide
gaccaaatagggcacggaaca

SEQ ID NO: 1240 - DNA, 21 bp, synthetic construct
  misc_feature 1..21: note = n-mer motif encoding polynucleotide
  source 1..21: mol_type = other DNA
gggacggggccgcatggtact

SEQ ID NO: 1241 - DNA, 21 bp, synthetic construct
  source 1..21: mol_type = other DNA
  misc_feature 1..21: note = n-mer motif encoding polynucleotide
attgggaataatactggtctt

SEQ ID NO: 1242 - DNA, 21 bp, synthetic construct
  source 1..21: mol_type = other DNA
  misc_feature 1..21: note = n-mer motif encoding polynucleotide
ttaaacgcagaatacaccaac

SEQ ID NO: 1243 - DNA, 21 bp, synthetic construct
  misc_feature 1..21: note = n-mer motif encoding polynucleotide
  source 1..21: mol_type = other DNA
gtgacgtcgtctgctagtggt

SEQ ID NO: 1244 - DNA, 21 bp, synthetic construct
  source 1..21: mol_type = other DNA
  misc_feature 1..21: note = n-mer motif encoding polynucleotide
acgcatgttgctaagcctgat

SEQ ID NO: 1245 - DNA, 21 bp, synthetic construct
  misc_feature 1..21: note = n-mer motif encoding polynucleotide
  source 1..21: mol_type = other DNA
ccgatgaacaaagacatactg

SEQ ID NO: 1246 - DNA, 21 bp, synthetic construct
  misc_feature 1..21: note = n-mer motif encoding polynucleotide
  source 1..21: mol_type = other DNA
cttagtttgaatatgaatgag

SEQ ID NO: 1247 - DNA, 21 bp, synthetic construct
  misc_feature 1..21: note = n-mer motif encoding polynucleotide
  source 1..21: mol_type = other DNA
gtcggcaactcaagcactcac

SEQ ID NO: 1248 - DNA, 21 bp, synthetic construct
  source 1..21: mol_type = other DNA
  misc_feature 1..21: note = n-mer motif encoding polynucleotide
ggccacggaagtgacttgacc

SEQ ID NO: 1249 - DNA, 21 bp, synthetic construct
  source 1..21: mol_type = other DNA
  misc_feature 1..21: note = n-mer motif encoding polynucleotide
cttacacaaaacccaacgaac

SEQ ID NO: 1250 - DNA, 21 bp, synthetic construct
  source 1..21: mol_type = other DNA
  misc_feature 1..21: note = n-mer motif encoding polynucleotide
ccgagtgatcatatgcggact

SEQ ID NO: 1251 - DNA, 21 bp, synthetic construct
  misc_feature 1..21: note = n-mer motif encoding polynucleotide
  source 1..21: mol_type = other DNA
cctgatagtcgtttggcggct

SEQ ID NO: 1252 - DNA, 21 bp, synthetic construct
  source 1..21: mol_type = other DNA
  misc_feature 1..21: note = n-mer motif encoding polynucleotide
tggggtagtgaggggacgatt

SEQ ID NO: 1253 - DNA, 21 bp, synthetic construct
  misc_feature 1..21: note = n-mer motif encoding polynucleotide
  source 1..21: mol_type = other DNA
aaaccgacaaacgactcgtac

SEQ ID NO: 1254 - DNA, 21 bp, synthetic construct
  misc_feature 1..21: note = n-mer motif encoding polynucleotide
  source 1..21: mol_type = other DNA
aaccgcggaacagaagtttac

SEQ ID NO: 1255 - DNA, 21 bp, synthetic construct
  source 1..21: mol_type = other DNA
  misc_feature 1..21: note = n-mer motif encoding polynucleotide
cacgtgatcacaacaaaagac

SEQ ID NO: 1256 - DNA, 21 bp, synthetic construct
  misc_feature 1..21: note = n-mer motif encoding polynucleotide
  source 1..21: mol_type = other DNA
attgtgtctaatccgccggcg

SEQ ID NO: 1257 - DNA, 21 bp, synthetic construct
  source 1..21: mol_type = other DNA
  misc_feature 1..21: note = n-mer motif encoding polynucleotide
atgcgtaacgaccaacaactt

SEQ ID NO: 1258 - DNA, 21 bp, synthetic construct
  source 1..21: mol_type = other DNA
  misc_feature 1..21: note = n-mer motif encoding polynucleotide
tttcagcgtgatgttggtcat

SEQ ID NO: 1259 - DNA, 21 bp, synthetic construct
  source 1..21: mol_type = other DNA
  misc_feature 1..21: note = n-mer motif encoding polynucleotide
gccaacgacaacaccaaacaa

SEQ ID NO: 1260 - DNA, 21 bp, synthetic construct
  misc_feature 1..21: note = n-mer motif encoding polynucleotide
  source 1..21: mol_type = other DNA
tctgttccgcatgcgggggat

SEQ ID NO: 1261 - DNA, 21 bp, synthetic construct
  misc_feature 1..21: note = n-mer motif encoding polynucleotide
  source 1..21: mol_type = other DNA
aatgctactccgccgaatcat

SEQ ID NO: 1262 - DNA, 21 bp, synthetic construct
  misc_feature 1..21: note = n-mer motif encoding polynucleotide
  source 1..21: mol_type = other DNA
tcagaacacacatcagttcta

SEQ ID NO: 1263 - DNA, 21 bp, synthetic construct
  misc_feature 1..21: note = n-mer motif encoding polynucleotide
  source 1..21: mol_type = other DNA
gccatgtcccaaacggacatc

SEQ ID NO: 1264 - DNA, 21 bp, synthetic construct
  misc_feature 1..21: note = n-mer motif encoding polynucleotide
  source 1..21: mol_type = other DNA
cctaaggctccgcttaataat

SEQ ID NO: 1265 - DNA, 21 bp, synthetic construct
  misc_feature 1..21: note = n-mer motif encoding polynucleotide
  source 1..21: mol_type = other DNA
accaacaacttactcgcacaa

SEQ ID NO: 1266 - DNA, 21 bp, synthetic construct
  source 1..21: mol_type = other DNA
  misc_feature 1..21: note = n-mer motif encoding polynucleotide
cagcgtcagggttcgggggtt

SEQ ID NO: 1267 - DNA, 21 bp, synthetic construct
  misc_feature 1..21: note = n-mer motif encoding polynucleotide
  source 1..21: mol_type = other DNA
cgcagtgacaccactaacgcc

SEQ ID NO: 1268 - DNA, 21 bp, synthetic construct
  misc_feature 1..21: note = n-mer motif encoding polynucleotide
  source 1..21: mol_type = other DNA
gaggctgataagaatggtgtt

SEQ ID NO: 1269 - DNA, 21 bp, synthetic construct
  misc_feature 1..21: note = n-mer motif encoding polynucleotide
  source 1..21: mol_type = other DNA
atgctggggggttttgcgcag

SEQ ID NO: 1270 - DNA, 21 bp, synthetic construct
  source 1..21: mol_type = other DNA
  misc_feature 1..21: note = n-mer motif encoding polynucleotide
atgacacacctcagcacagac

SEQ ID NO: 1271 - DNA, 21 bp, synthetic construct
  source 1..21: mol_type = other DNA
  misc_feature 1..21: note = n-mer motif encoding polynucleotide
gttttgtctgataaggcgttt

SEQ ID NO: 1272 - DNA, 21 bp, synthetic construct
  misc_feature 1..21: note = n-mer motif encoding polynucleotide
  source 1..21: mol_type = other DNA
acaccctccggtaccataaaa

SEQ ID NO: 1273 - DNA, 21 bp, synthetic construct
  source 1..21: mol_type = other DNA
  misc_feature 1..21: note = n-mer motif encoding polynucleotide
attattcttatgggtcagagt

SEQ ID NO: 1274 - DNA, 21 bp, synthetic construct
  source 1..21: mol_type = other DNA
  misc_feature 1..21: note = n-mer motif encoding polynucleotide
ctttcggggggtgagactctt

SEQ ID NO: 1275 - DNA, 21 bp, synthetic construct
  source 1..21: mol_type = other DNA
  misc_feature 1..21: note = n-mer motif encoding polynucleotide
accgacggcgccctgggttac

SEQ ID NO: 1276 - DNA, 21 bp, synthetic construct
  source 1..21: mol_type = other DNA
  misc_feature 1..21: note = n-mer motif encoding polynucleotide
gggaataaggctgcgctgacg

SEQ ID NO: 1277 - protein, 7 aa, synthetic construct
  REGION 1..7: note = n-mer motif
RGDLSTP

SEQ ID NO: 1278 - protein, 7 aa, synthetic construct
  REGION 1..7: note = n-mer motif
RGDLNQY

SEQ ID NO: 1279 - protein, 7 aa, synthetic construct
  REGION 1..7: note = n-mer motif
RGDLTTP

SEQ ID NO: 1280 - protein, 7 aa, synthetic construct
  REGION 1..7: note = n-mer motif
RGDATEL

SEQ ID NO: 1281 - protein, 7 aa, synthetic construct
  REGION 1..7: note = n-mer motif
RGDQLYH

SEQ ID NO: 1282 - protein, 7 aa, synthetic construct
  REGION 1..7: note = n-mer motif
RGDLSTP

SEQ ID NO: 1283 - protein, 7 aa, synthetic construct
  REGION 1..7: note = n-mer motif
RGDVAAK

SEQ ID NO: 1284 - protein, 7 aa, synthetic construct
  REGION 1..7: note = n-mer motif
RGDLTTP

SEQ ID NO: 1285 - protein, 7 aa, synthetic construct
  REGION 1..7: note = n-mer motif
RGDLNQY

SEQ ID NO: 1286 - protein, 7 aa, synthetic construct
  REGION 1..7: note = n-mer motif
RGDTMSK

SEQ ID NO: 1287 - protein, 7 aa, synthetic construct
  REGION 1..7: note = n-mer motif
RGDVAAK

SEQ ID NO: 1288 - protein, 7 aa, synthetic construct
  REGION 1..7: note = n-mer motif
RGDTMSK

SEQ ID NO: 1289 - protein, 7 aa, synthetic construct
  REGION 1..7: note = n-mer motif
RGDATEL

SEQ ID NO: 1290 - protein, 7 aa, synthetic construct
  REGION 1..7: note = n-mer motif
ARSNDSV

SEQ ID NO: 1291 - protein, 7 aa, synthetic construct
  REGION 1..7: note = n-mer motif
RGDMNNS

SEQ ID NO: 1292 - protein, 7 aa, synthetic construct
  REGION 1..7: note = n-mer motif
TMGANGT

SEQ ID NO: 1293 - protein, 7 aa, synthetic construct
  REGION 1..7: note = n-mer motif
PNVTQSY

SEQ ID NO: 1294 - protein, 7 aa, synthetic construct
  REGION 1..7: note = n-mer motif
RLDLQVH

SEQ ID NO: 1295 - protein, 7 aa, synthetic construct
  REGION 1..7: note = n-mer motif
GLSKASD

SEQ ID NO: 1296 - protein, 7 aa, synthetic construct
  REGION 1..7: note = n-mer motif
DPGRTGT

SEQ ID NO: 1297 - protein, 7 aa, synthetic construct
  REGION 1..7: note = n-mer motif
YRGREDW

SEQ ID NO: 1298 - protein, 7 aa, synthetic construct
  REGION 1..7: note = n-mer motif
RYGESIE

SEQ ID NO: 1299 - protein, 7 aa, synthetic construct
  REGION 1..7: note = n-mer motif
SLNNMGS

SEQ ID NO: 1300 - protein, 7 aa, synthetic construct
  REGION 1..7: note = n-mer motif
NSDQRNW

SEQ ID NO: 1301 - protein, 7 aa, synthetic construct
  REGION 1..7: note = n-mer motif
RGDMSRE

SEQ ID NO: 1302 - protein, 7 aa, synthetic construct
  REGION 1..7: note = n-mer motif
MTDANRI

SEQ ID NO: 1303 - protein, 7 aa, synthetic construct
  REGION 1..7: note = n-mer motif
VYNGNVV

SEQ ID NO: 1304 - protein, 7 aa, synthetic construct
  REGION 1..7: note = n-mer motif
RGDMINT

SEQ ID NO: 1305 - protein, 7 aa, synthetic construct
  REGION 1..7: note = n-mer motif
SGLSHGQ

SEQ ID NO: 1306 - protein, 7 aa, synthetic construct
  REGION 1..7: note = n-mer motif
TGQLVGT

SEQ ID NO: 1307 - protein, 7 aa, synthetic construct
  REGION 1..7: note = n-mer motif
ANSIGGP

SEQ ID NO: 1308 - protein, 7 aa, synthetic construct
  REGION 1..7: note = n-mer motif
YSQSLSE

SEQ ID NO: 1309 - protein, 7 aa, synthetic construct
  REGION 1..7: note = n-mer motif
YHKYSTD

SEQ ID NO: 1310 - protein, 7 aa, synthetic construct
  REGION 1..7: note = n-mer motif
ARHDEHV

SEQ ID NO: 1311 - protein, 7 aa, synthetic construct
  REGION 1..7: note = n-mer motif
AIDSIKQ

SEQ ID NO: 1312 - protein, 7 aa, synthetic construct
  REGION 1..7: note = n-mer motif
RLDLQVN

SEQ ID NO: 1313 - protein, 7 aa, synthetic construct
  REGION 1..7: note = n-mer motif
RGDMINT

SEQ ID NO: 1314 - protein, 7 aa, synthetic construct
  REGION 1..7: note = n-mer motif
SVLSQAN

SEQ ID NO: 1315 - protein, 7 aa, synthetic construct
  REGION 1..7: note = n-mer motif
FTVNQDL

SEQ ID NO: 1316 - protein, 7 aa, synthetic construct
  REGION 1..7: note = n-mer motif
TDNGLLV

SEQ ID NO: 1317 - protein, 7 aa, synthetic construct
  REGION 1..7: note = n-mer motif
YQQTSST

SEQ ID NO: 1318 - protein, 7 aa, synthetic construct
  REGION 1..7: note = n-mer motif
TEQSYSR

SEQ ID NO: 1319 - protein, 7 aa, synthetic construct
  REGION 1..7: note = n-mer motif
IMGLSQA

SEQ ID NO: 1320 - protein, 7 aa, synthetic construct
  REGION 1..7: note = n-mer motif
ATAHQDG

SEQ ID NO: 1321 - protein, 7 aa, synthetic construct
  REGION 1..7: note = n-mer motif
YNATPSQ

SEQ ID NO: 1322 - protein, 7 aa, synthetic construct
  REGION 1..7: note = n-mer motif
YTQGIMN

SEQ ID NO: 1323 - protein, 7 aa, synthetic construct
  REGION 1..7: note = n-mer motif
ESLPISK

SEQ ID NO: 1324 - protein, 7 aa, synthetic construct
  REGION 1..7: note = n-mer motif
GTVVPGS

SEQ ID NO: 1325 - protein, 7 aa, synthetic construct
  REGION 1..7: note = n-mer motif
GLASLHL

SEQ ID NO: 1326 - protein, 7 aa, synthetic construct
  REGION 1..7: note = n-mer motif
YIAAGEQ

SEQ ID NO: 1327 - protein, 7 aa, synthetic construct
  REGION 1..7: note = n-mer motif
NTYPFNA

SEQ ID NO: 1328 - protein, 7 aa, synthetic construct
  REGION 1..7: note = n-mer motif
VGASTAS

SEQ ID NO: 1329 - protein, 7 aa, synthetic construct
  REGION 1..7: note = n-mer motif
GSNYLAN

SEQ ID NO: 1330 - protein, 7 aa, synthetic construct
  REGION 1..7: note = n-mer motif
DTGRTGT

SEQ ID NO: 1331 - protein, 7 aa, synthetic construct
  REGION 1..7: note = n-mer motif
KPNTMSD

SEQ ID NO: 1332 - protein, 7 aa, synthetic construct
  REGION 1..7: note = n-mer motif
VDKSSPV

SEQ ID NO: 1333 - protein, 7 aa, synthetic construct
  REGION 1..7: note = n-mer motif
SSDPKGQ

SEQ ID NO: 1334 - protein, 7 aa, synthetic construct
  REGION 1..7: note = n-mer motif
WQTNGMQ

SEQ ID NO: 1335 - protein, 7 aa, synthetic construct
  REGION 1..7: note = n-mer motif
TGSLNSM

SEQ ID NO: 1336 - protein, 7 aa, synthetic construct
  REGION 1..7: note = n-mer motif
HSNSSQN

SEQ ID NO: 1337 - protein, 7 aa, synthetic construct
  REGION 1..7: note = n-mer motif
GRDDLTN

SEQ ID NO: 1338 - protein, 7 aa, synthetic construct
  REGION 1..7: note = n-mer motif
DTYKGKW

SEQ ID NO: 1339 - protein, 7 aa, synthetic construct
  REGION 1..7: note = n-mer motif
YTAQTGW

SEQ ID NO: 1340 - protein, 7 aa, synthetic construct
  REGION 1..7: note = n-mer motif
NQVGASA

SEQ ID NO: 1341 - protein, 7 aa, synthetic construct
  REGION 1..7: note = n-mer motif
IDVLNGS

SEQ ID NO: 1342 - protein, 7 aa, synthetic construct
  REGION 1..7: note = n-mer motif
FRTVYTG

SEQ ID NO: 1343 - protein, 7 aa, synthetic construct
  REGION 1..7: note = n-mer motif
GNMVTPN

SEQ ID NO: 1344 - protein, 7 aa, synthetic construct
  REGION 1..7: note = n-mer motif
DTYNGKW

SEQ ID NO: 1345 - protein, 7 aa, synthetic construct
  REGION 1..7: note = n-mer motif
TIQDHIK

SEQ ID NO: 1346 - protein, 7 aa, synthetic construct
  REGION 1..7: note = n-mer motif
GAKGTMG

SEQ ID NO: 1347 - protein, 7 aa, synthetic construct
  REGION 1..7: note = n-mer motif
TRSNSDE

SEQ ID NO: 1348 - protein, 7 aa, synthetic construct
  REGION 1..7: note = n-mer motif
ATTLTGD

SEQ ID NO: 1349 - protein, 7 aa, synthetic construct
  REGION 1..7: note = n-mer motif
SYGGSGP

SEQ ID NO: 1350 - protein, 7 aa, synthetic construct
  REGION 1..7: note = n-mer motif
EKSVESK

SEQ ID NO: 1351 - protein, 7 aa, synthetic construct
  REGION 1..7: note = n-mer motif
RGDTMNY

SEQ ID NO: 1352 - protein, 7 aa, synthetic construct
  REGION 1..7: note = n-mer motif
RDLGQTG

SEQ ID NO: 1353 - protein, 7 aa, synthetic construct
  REGION 1..7: note = n-mer motif
SPQLSVM

SEQ ID NO: 1354 - protein, 7 aa, synthetic construct
  REGION 1..7: note = n-mer motif
RGDNSTP

SEQ ID NO: 1355 - protein, 7 aa, synthetic construct
  REGION 1..7: note = n-mer motif
PMAGHPP

SEQ ID NO: 1356 - protein, 7 aa, synthetic construct
  REGION 1..7: note = n-mer motif
TAYQAGL

SEQ ID NO: 1357 - protein, 7 aa, synthetic construct
  REGION 1..7: note = n-mer motif
VVNQGNQ

SEQ ID NO: 1358 - protein, 7 aa, synthetic construct
  REGION 1..7: note = n-mer motif
DKTEMLQ

SEQ ID NO: 1359 - protein, 7 aa, synthetic construct
  REGION 1..7: note = n-mer motif
TVMMSTR

SEQ ID NO: 1360 - protein, 7 aa, synthetic construct
  REGION 1..7: note = n-mer motif
QQNTRLP

SEQ ID NO: 1361 - protein, 7 aa, synthetic construct
  REGION 1..7: note = n-mer motif
YQHNQAH

SEQ ID NO: 1362 - protein, 7 aa, synthetic construct
  REGION 1..7: note = n-mer motif
NQSINNI

SEQ ID NO: 1363 - protein, 7 aa, synthetic construct
  REGION 1..7: note = n-mer motif
RGDHSTP

SEQ ID NO: 1364 - protein, 7 aa, synthetic construct
  REGION 1..7: note = n-mer motif
DSTLHLS

SEQ ID NO: 1365 - protein, 7 aa, synthetic construct
  REGION 1..7: note = n-mer motif
ANIENTS

SEQ ID NO: 1366 - protein, 7 aa, synthetic construct
  REGION 1..7: note = n-mer motif
TNAALVP

SEQ ID NO: 1367 - protein, 7 aa, synthetic construct
  REGION 1..7: note = n-mer motif
GQKETTA

SEQ ID NO: 1368 - protein, 7 aa, synthetic construct
  REGION 1..7: note = n-mer motif
ELNTAHA

SEQ ID NO: 1369 - protein, 7 aa, synthetic construct
  REGION 1..7: note = n-mer motif
GVSSNSA

SEQ ID NO: 1370 - protein, 7 aa, synthetic construct
  REGION 1..7: note = n-mer motif
STNAGQR

SEQ ID NO: 1371 - protein, 7 aa, synthetic construct
  REGION 1..7: note = n-mer motif
EQQKTDN

SEQ ID NO: 1372 - protein, 7 aa, synthetic construct
  REGION 1..7: note = n-mer motif
AVVNENM

SEQ ID NO: 1373 - protein, 7 aa, synthetic construct
  REGION 1..7: note = n-mer motif
GSVSTSA

SEQ ID NO: 1374 - protein, 7 aa, synthetic construct
  REGION 1..7: note = n-mer motif
ELGSQRM

SEQ ID NO: 1375 - protein, 7 aa, synthetic construct
  REGION 1..7: note = n-mer motif
RGDLSTH

SEQ ID NO: 1376 - protein, 7 aa, synthetic construct
  REGION 1..7: note = n-mer motif
DHQQALA

SEQ ID NO: 1377 - protein, 7 aa, synthetic construct
  REGION 1..7: note = n-mer motif
NRSDAHE

SEQ ID NO: 1378 - protein, 7 aa, synthetic construct
  REGION 1..7: note = n-mer motif
NVNAQSR

SEQ ID NO: 1379 - protein, 7 aa, synthetic construct
  REGION 1..7: note = n-mer motif
TQGNNMV

SEQ ID NO: 1380 - protein, 7 aa, synthetic construct
  REGION 1..7: note = n-mer motif
TALNTYP

SEQ ID NO: 1381 - protein, 7 aa, synthetic construct
  REGION 1..7: note = n-mer motif
VSTYLLA

SEQ ID NO: 1382 - protein, 7 aa, synthetic construct
  REGION 1..7: note = n-mer motif
GGNYNTT

SEQ ID NO: 1383 - protein, 7 aa, synthetic construct
  REGION 1..7: note = n-mer motif
SNIKPEI

SEQ ID NO: 1384 - protein, 7 aa, synthetic construct
  REGION 1..7: note = n-mer motif
PRVHGQV

SEQ ID NO: 1385 - protein, 7 aa, synthetic construct
  REGION 1..7: note = n-mer motif
SNSNTAA

SEQ ID NO: 1386 - protein, 7 aa, synthetic construct
  REGION 1..7: note = n-mer motif
LEVATSP

SEQ ID NO: 1387 - protein, 7 aa, synthetic construct
  REGION 1..7: note = n-mer motif
HDADKLA

SEQ ID NO: 1388 - protein, 7 aa, synthetic construct
  REGION 1..7: note = n-mer motif
GVYIDGR

SEQ ID NO: 1389 - protein, 7 aa, synthetic construct
  REGION 1..7: note = n-mer motif
SMQSYTM

SEQ ID NO: 1390 - protein, 7 aa, synthetic construct
  REGION 1..7: note = n-mer motif
SKGNEQM

SEQ ID NO: 1391 - protein, 7 aa, synthetic construct
  REGION 1..7: note = n-mer motif
GRDYAMS

SEQ ID NO: 1392 - protein, 7 aa, synthetic construct
  REGION 1..7: note = n-mer motif
TDGIFQP

SEQ ID NO: 1393 - protein, 7 aa, synthetic construct
  REGION 1..7: note = n-mer motif
GSPVIVN

SEQ ID NO: 1394 - protein, 7 aa, synthetic construct
  REGION 1..7: note = n-mer motif
TLTDVHR

SEQ ID NO: 1395 - protein, 7 aa, synthetic construct
  REGION 1..7: note = n-mer motif
KSEVPAR

SEQ ID NO: 1396 - protein, 7 aa, synthetic construct
  REGION 1..7: note = n-mer motif
VNTGALL

SEQ ID NO: 1397 - protein, 7 aa, synthetic construct
  REGION 1..7: note = n-mer motif
SQQGFTL

SEQ ID NO: 1398 - protein, 7 aa, synthetic construct
  REGION 1..7: note = n-mer motif
NNKSVPD

SEQ ID NO: 1399 - protein, 7 aa, synthetic construct
  REGION 1..7: note = n-mer motif
SVMVGTN

SEQ ID NO: 1400 - protein, 7 aa, synthetic construct
  REGION 1..7: note = n-mer motif
RNENTYN

SEQ ID NO: 1401 - protein, 7 aa, synthetic construct
  REGION 1..7: note = n-mer motif
QANLSII

SEQ ID NO: 1402 - protein, 7 aa, synthetic construct
  REGION 1..7: note = n-mer motif
PGRDSRT

SEQ ID NO: 1403 - protein, 7 aa, synthetic construct
  REGION 1..7: note = n-mer motif
FPANGGA

SEQ ID NO: 1404 - protein, 7 aa, synthetic construct
  REGION 1..7: note = n-mer motif
AGKDLSN

SEQ ID NO: 1405 - protein, 7 aa, synthetic construct
  REGION 1..7: note = n-mer motif
AQFESGR

SEQ ID NO: 1406 - protein, 7 aa, synthetic construct
  REGION 1..7: note = n-mer motif
GYGSYSN

SEQ ID NO: 1407 - protein, 7 aa, synthetic construct
  REGION 1..7: note = n-mer motif
TIVSAYA

SEQ ID NO: 1408 - protein, 7 aa, synthetic construct
  REGION 1..7: note = n-mer motif
NVSPNLT

SEQ ID NO: 1409 - protein, 7 aa, synthetic construct
  REGION 1..7: note = n-mer motif
RGDLSTP

SEQ ID NO: 1410 - protein, 7 aa, synthetic construct
  REGION 1..7: note = n-mer motif
FLEGVAQ

SEQ ID NO: 1411 - protein, 7 aa, synthetic construct
  REGION 1..7: note = n-mer motif
GSERGER

SEQ ID NO: 1412 - protein, 7 aa, synthetic construct
  REGION 1..7: note = n-mer motif
LNVGSSL

SEQ ID NO: 1413 - protein, 7 aa, synthetic construct
  REGION 1..7: note = n-mer motif
RIVANEQ

SEQ ID NO: 1414 - protein, 7 aa, synthetic construct
  REGION 1..7: note = n-mer motif
QSIGHPV

SEQ ID NO: 1415 - protein, 7 aa, synthetic construct
  REGION 1..7: note = n-mer motif
GGMSAHS

SEQ ID NO: 1416 - protein, 7 aa, synthetic construct
  REGION 1..7: note = n-mer motif
HSTTSMT

SEQ ID NO: 1417 - protein, 7 aa, synthetic construct
  REGION 1..7: note = n-mer motif
TVNGTNV

SEQ ID NO: 1418 - protein, 7 aa, synthetic construct
  REGION 1..7: note = n-mer motif
LAPDNIG

SEQ ID NO: 1419 - protein, 7 aa, synthetic construct
  REGION 1..7: note = n-mer motif
QTATLVA

SEQ ID NO: 1420 - protein, 7 aa, synthetic construct
  REGION 1..7: note = n-mer motif
ASAPSEF

SEQ ID NO: 1421 - protein, 7 aa, synthetic construct
  REGION 1..7: note = n-mer motif
SMEGQQH

SEQ ID NO: 1422 - protein, 7 aa, synthetic construct
  REGION 1..7: note = n-mer motif
QDVGRTN

SEQ ID NO: 1423 - protein, 7 aa, synthetic construct
  REGION 1..7: note = n-mer motif
VYNGNEV

SEQ ID NO: 1424 - protein, 7 aa, synthetic construct
  REGION 1..7: note = n-mer motif
AQAQTGW

SEQ ID NO: 1425 - protein, 7 aa, synthetic construct
  REGION 1..7: note = n-mer motif
RLDLTHT

SEQ ID NO: 1426 - protein, 7 aa, synthetic construct
  REGION 1..7: note = n-mer motif
AAHGREQ

SEQ ID NO: 1427 - protein, 7 aa, synthetic construct
  REGION 1..7: note = n-mer motif
RGDLYTP

SEQ ID NO: 1428 - protein, 7 aa, synthetic construct
  REGION 1..7: note = n-mer motif
GMQQREK

SEQ ID NO: 1429 - protein, 7 aa, synthetic construct
  REGION 1..7: note = n-mer motif
QTQASTN

SEQ ID NO: 1430 - protein, 7 aa, synthetic construct
  REGION 1..7: note = n-mer motif
RDTNALG

SEQ ID NO: 1431 - protein, 7 aa, synthetic construct
  REGION 1..7: note = n-mer motif
SSQISNS

SEQ ID NO: 1432 - protein, 7 aa, synthetic construct
  REGION 1..7: note = n-mer motif
QSVNSTS

SEQ ID NO: 1433 - protein, 7 aa, synthetic construct
  REGION 1..7: note = n-mer motif
ALERAQY

SEQ ID NO: 1434 - protein, 7 aa, synthetic construct
  REGION 1..7: note = n-mer motif
HTGHSSV

SEQ ID NO: 1435 - protein, 7 aa, synthetic construct
  REGION 1..7: note = n-mer motif
RGDMTRA

SEQ ID NO: 1436 - protein, 7 aa, synthetic construct
  REGION 1..7: note = n-mer motif
FQRDLGH

SEQ ID NO: 1437 - protein, 7 aa, synthetic construct
  REGION 1..7: note = n-mer motif
TTGDIIR

SEQ ID NO: 1438 - protein, 7 aa, synthetic construct
  REGION 1..7: note = n-mer motif
SFQTDRA

SEQ ID NO: 1439 - protein, 7 aa, synthetic construct
  REGION 1..7: note = n-mer motif
QSSDGRV

SEQ ID NO: 1440 - protein, 7 aa, synthetic construct
  REGION 1..7: note = n-mer motif
TSGALTR

SEQ ID NO: 1441 - protein, 7 aa, synthetic construct
  REGION 1..7: note = n-mer motif
NSNTVNT

SEQ ID NO: 1442 - protein, 7 aa, synthetic construct
  REGION 1..7: note = n-mer motif
ISGSSSL

SEQ ID NO: 1443 - protein, 7 aa, synthetic construct
  REGION 1..7: note = n-mer motif
NDKSTNV

SEQ ID NO: 1444 - protein, 7 aa, synthetic construct
  REGION 1..7: note = n-mer motif
IVLAPTS

SEQ ID NO: 1445 - protein, 7 aa, synthetic construct
  REGION 1..7: note = n-mer motif
SGVNYGV

SEQ ID NO: 1446 - protein, 7 aa, synthetic construct
  REGION 1..7: note = n-mer motif
VGAQRDP

SEQ ID NO: 1447 - protein, 7 aa, synthetic construct
  REGION 1..7: note = n-mer motif
TGMNSNK

SEQ ID NO: 1448 - protein, 7 aa, synthetic construct
  REGION 1..7: note = n-mer motif
IEAYSRD

SEQ ID NO: 1449 - protein, 7 aa, synthetic construct
  REGION 1..7: note = n-mer motif
LHTTLMP

SEQ ID NO: 1450 - protein, 7 aa, synthetic construct
  REGION 1..7: note = n-mer motif
SDNHLKT

SEQ ID NO: 1451 - protein, 7 aa, synthetic construct
  REGION 1..7: note = n-mer motif
RNEDKGG

SEQ ID NO: 1452 - protein, 7 aa, synthetic construct
  REGION 1..7: note = n-mer motif
TKGANGT

SEQ ID NO: 1453 - protein, 7 aa, synthetic construct
  REGION 1..7: note = n-mer motif
VYNGNVE

SEQ ID NO: 1454 - protein, 7 aa, synthetic construct
  REGION 1..7: note = n-mer motif
SNSGGNH

SEQ ID NO: 1455 - protein, 7 aa, synthetic construct
  REGION 1..7: note = n-mer motif
VAAGPEA

SEQ ID NO: 1456 - protein, 7 aa, synthetic construct
  REGION 1..7: note = n-mer motif
TSLSGSA

SEQ ID NO: 1457 - protein, 7 aa, synthetic construct
  REGION 1..7: note = n-mer motif
VGLQSNT

SEQ ID NO: 1458 - protein, 7 aa, synthetic construct
  REGION 1..7: note = n-mer motif
HTAHSVD

SEQ ID NO: 1459 - protein, 7 aa, synthetic construct
  REGION 1..7: note = n-mer motif
NVGMSST

SEQ ID NO: 1460 - protein, 7 aa, synthetic construct
  REGION 1..7: note = n-mer motif
HADVNAG

SEQ ID NO: 1461 - protein, 7 aa, synthetic construct
  REGION 1..7: note = n-mer motif
KAGQLVE

SEQ ID NO: 1462 - protein, 7 aa, synthetic construct
  REGION 1..7: note = n-mer motif
STFSVLP

SEQ ID NO: 1463 - protein, 7 aa, synthetic construct
  REGION 1..7: note = n-mer motif
PQSPSRV

SEQ ID NO: 1464 - protein, 7 aa, synthetic construct
  REGION 1..7: note = n-mer motif
HTATLSS

SEQ ID NO: 1465 - protein, 7 aa, synthetic construct
  REGION 1..7: note = n-mer motif
LPRHDQY

SEQ ID NO: 1466 - protein, 7 aa, synthetic construct
  REGION 1..7: note = n-mer motif
QVNNPLT

SEQ ID NO: 1467 - protein, 7 aa, synthetic construct
  REGION 1..7: note = n-mer motif
TTETARG

SEQ ID NO: 1468 - protein, 7 aa, synthetic construct
  REGION 1..7: note = n-mer motif
VHGTLTY

SEQ ID NO: 1469 - protein, 7 aa, synthetic construct
  REGION 1..7: note = n-mer motif
YSTDLRM

SEQ ID NO: 1470 - protein, 7 aa, synthetic construct
  REGION 1..7: note = n-mer motif
AHATSST

SEQ ID NO: 1471 - protein, 7 aa, synthetic construct
  REGION 1..7: note = n-mer motif
RESAALA

SEQ ID NO: 1472 - protein, 7 aa, synthetic construct
  REGION 1..7: note = n-mer motif
KDTNQQI

SEQ ID NO: 1473 - protein, 7 aa, synthetic construct
  REGION 1..7: note = n-mer motif
SMQSYTM

SEQ ID NO: 1474 - protein, 7 aa, synthetic construct
  REGION 1..7: note = n-mer motif
TAYSPTV

SEQ ID NO: 1475 - protein, 7 aa, synthetic construct
  REGION 1..7: note = n-mer motif
ESAHQRI

SEQ ID NO: 1476 - protein, 7 aa, synthetic construct
  REGION 1..7: note = n-mer motif
RYTTAQQ

SEQ ID NO: 1477 - protein, 7 aa, synthetic construct
  REGION 1..7: note = n-mer motif
TSVANVS

SEQ ID NO: 1478 - protein, 7 aa, synthetic construct
  REGION 1..7: note = n-mer motif
RDQHTSI

SEQ ID NO: 1479 - protein, 7 aa, synthetic construct
  REGION 1..7: note = n-mer motif
SVTSSGP

SEQ ID NO: 1480 - protein, 7 aa, synthetic construct
  REGION 1..7: note = n-mer motif
AVVLNSN

SEQ ID NO: 1481 - protein, 7 aa, synthetic construct
  REGION 1..7: note = n-mer motif
PGNPSSN

SEQ ID NO: 1482 - protein, 7 aa, synthetic construct
  REGION 1..7: note = n-mer motif
TGSTTQL

SEQ ID NO: 1483 - protein, 7 aa, synthetic construct
  REGION 1..7: note = n-mer motif
ANEHNVG

SEQ ID NO: 1484 - protein, 7 aa, synthetic construct
  REGION 1..7: note = n-mer motif
MQREAAN

SEQ ID NO: 1485 - protein, 7 aa, synthetic construct
  REGION 1..7: note = n-mer motif
LTDTNTR

SEQ ID NO: 1486 - protein, 7 aa, synthetic construct
  REGION 1..7: note = n-mer motif
RMTEISY

SEQ ID NO: 1487 - protein, 7 aa, synthetic construct
  REGION 1..7: note = n-mer motif
KVDMTSK

SEQ ID NO: 1488 - protein, 7 aa, synthetic construct
  REGION 1..7: note = n-mer motif
RGDLSTP

SEQ ID NO: 1489 - protein, 7 aa, synthetic construct
  REGION 1..7: note = n-mer motif
QAKASTT

SEQ ID NO: 1490 - protein, 7 aa, synthetic construct
  REGION 1..7: note = n-mer motif
LPSTETL

SEQ ID NO: 1491 - protein, 7 aa, synthetic construct
  REGION 1..7: note = n-mer motif
SSALNAY

SEQ ID NO: 1492 - protein, 7 aa, synthetic construct
  REGION 1..7: note = n-mer motif
SSDPKGQ

SEQ ID NO: 1493 - protein, 7 aa, synthetic construct
  REGION 1..7: note = n-mer motif
LDVTRMR

SEQ ID NO: 1494 - protein, 7 aa, synthetic construct
  REGION 1..7: note = n-mer motif
ADGGDKG

SEQ ID NO: 1495 - protein, 7 aa, synthetic construct
  REGION 1..7: note = n-mer motif
MLSQVTL

SEQ ID NO: 1496 - protein, 7 aa, synthetic construct
  REGION 1..7: note = n-mer motif
SVSSVVL

SEQ ID NO: 1497 - protein, 7 aa, synthetic construct
  REGION 1..7: note = n-mer motif
TESQTMR

SEQ ID NO: 1498 - protein, 7 aa, synthetic construct
  REGION 1..7: note = n-mer motif
FGSQEKL

SEQ ID NO: 1499 - protein, 7 aa, synthetic construct
  REGION 1..7: note = n-mer motif
TAGGERA

SEQ ID NO: 1500 - protein, 7 aa, synthetic construct
  REGION 1..7: note = n-mer motif
DHSKQSS

SEQ ID NO: 1501 - protein, 7 aa, synthetic construct
  REGION 1..7: note = n-mer motif
IDSTWNT

SEQ ID NO: 1502 - protein, 7 aa, synthetic construct
  REGION 1..7: note = n-mer motif
SPRPELR

SEQ ID NO: 1503 - protein, 7 aa, synthetic construct
  REGION 1..7: note = n-mer motif
SIATATS

SEQ ID NO: 1504 - protein, 7 aa, synthetic construct
  REGION 1..7: note = n-mer motif
VIGGHGT

SEQ ID NO: 1505 - protein, 7 aa, synthetic construct
  REGION 1..7: note = n-mer motif
STAMYPH

SEQ ID NO: 1506 - protein, 7 aa, synthetic construct
  REGION 1..7: note = n-mer motif
RDLRPVT

SEQ ID NO: 1507 - protein, 7 aa, synthetic construct
  REGION 1..7: note = n-mer motif
AHLTDLP

SEQ ID NO: 1508 - protein, 7 aa, synthetic construct
  REGION 1..7: note = n-mer motif
FLNSTQL

SEQ ID NO: 1509 - protein, 7 aa, synthetic construct
  REGION 1..7: note = n-mer motif
LNNSATV

SEQ ID NO: 1510 - protein, 7 aa, synthetic construct
  REGION 1..7: note = n-mer motif
DRPNNMT

SEQ ID NO: 1511 - protein, 7 aa, synthetic construct
  REGION 1..7: note = n-mer motif
SSSDSPR

SEQ ID NO: 1512 - protein, 7 aa, synthetic construct
  REGION 1..7: note = n-mer motif
RLDVGSP

SEQ ID NO: 1513 - protein, 7 aa, synthetic construct
  REGION 1..7: note = n-mer motif
AQQSLHG

SEQ ID NO: 1514 - protein, 7 aa, synthetic construct
  REGION 1..7: note = n-mer motif
MGKHEGL

SEQ ID NO: 1515 - protein, 7 aa, synthetic construct
  REGION 1..7: note = n-mer motif
ENAREGV

SEQ ID NO: 1516 - protein, 7 aa, synthetic construct
  REGION 1..7: note = n-mer motif
TVSLSEG

SEQ ID NO: 1517 - protein, 7 aa, synthetic construct
  REGION 1..7: note = n-mer motif
LNTLIDR

SEQ ID NO: 1518 - protein, 7 aa, synthetic construct
  REGION 1..7: note = n-mer motif
ELSVPKP

SEQ ID NO: 1519 - protein, 7 aa, synthetic construct
  REGION 1..7: note = n-mer motif
KDKNVYI

SEQ ID NO: 1520 - protein, 7 aa, synthetic construct
  REGION 1..7: note = n-mer motif
NANGPVS

SEQ ID NO: 1521 - protein, 7 aa, synthetic construct
  REGION 1..7: note = n-mer motif
LTTNGML

SEQ ID NO: 1522 - protein, 7 aa, synthetic construct
  REGION 1..7: note = n-mer motif
AGESSPT

SEQ ID NO: 1523 - protein, 7 aa, synthetic construct
  REGION 1..7: note = n-mer motif
SGIGTYS

SEQ ID NO: 1524 - protein, 7 aa, synthetic construct
  REGION 1..7: note = n-mer motif
VRSMDEL

SEQ ID NO: 1525 - protein, 7 aa, synthetic construct
  REGION 1..7: note = n-mer motif
MNTGSSS

SEQ ID NO: 1526 - protein, 7 aa, synthetic construct
  REGION 1..7: note = n-mer motif
GVTVREL

SEQ ID NO: 1527 - protein, 7 aa, synthetic construct
  REGION 1..7: note = n-mer motif
QILNYSV

SEQ ID NO: 1528 - protein, 7 aa, synthetic construct
  REGION 1..7: note = n-mer motif
MAGEYRV

SEQ ID NO: 1529 - protein, 7 aa, synthetic construct
  REGION 1..7: note = n-mer motif
WSHDRPT

SEQ ID NO: 1530 - protein, 7 aa, synthetic construct
  REGION 1..7: note = n-mer motif
CKNNSEC

SEQ ID NO: 1531 - protein, 7 aa, synthetic construct
  REGION 1..7: note = n-mer motif
LTTNSHY

SEQ ID NO: 1532 - protein, 7 aa, synthetic construct
  REGION 1..7: note = n-mer motif
MLVQNTP

SEQ ID NO: 1533 - protein, 7 aa, synthetic construct
  REGION 1..7: note = n-mer motif
RGATEHA

SEQ ID NO: 1534 - protein, 7 aa, synthetic construct
  REGION 1..7: note = n-mer motif
ASNGSMG

SEQ ID NO: 1535 - protein, 7 aa, synthetic construct
  REGION 1..7: note = n-mer motif
NSYTAGK

SEQ ID NO: 1536 - protein, 7 aa, synthetic construct
  REGION 1..7: note = n-mer motif
STQGAIL

SEQ ID NO: 1537 - protein, 7 aa, synthetic construct
  REGION 1..7: note = n-mer motif
WNTNMAI

SEQ ID NO: 1538 - protein, 7 aa, synthetic construct
  REGION 1..7: note = n-mer motif
VSSYEKI

SEQ ID NO: 1539 - protein, 7 aa, synthetic construct
  REGION 1..7: note = n-mer motif
VLSTGQR

SEQ ID NO: 1540 - protein, 7 aa, synthetic construct
  REGION 1..7: note = n-mer motif
PIPHGSS

SEQ ID NO: 1541 - protein, 7 aa, synthetic construct
  REGION 1..7: note = n-mer motif
NVSLTQT

SEQ ID NO: 1542 - protein, 7 aa, synthetic construct
  REGION 1..7: note = n-mer motif
STIGNST

SEQ ID NO: 1543 - protein, 7 aa, synthetic construct
  REGION 1..7: note = n-mer motif
SEKLTDK

SEQ ID NO: 1544 - protein, 7 aa, synthetic construct
  REGION 1..7: note = n-mer motif
SKDSNIS

SEQ ID NO: 1545 - protein, 7 aa, synthetic construct
  REGION 1..7: note = n-mer motif
ANSNHER

SEQ ID NO: 1546 - protein, 7 aa, synthetic construct
  REGION 1..7: note = n-mer motif
RDTGDKA

SEQ ID NO: 1547 - protein, 7 aa, synthetic construct
  REGION 1..7: note = n-mer motif
RTDTPST

SEQ ID NO: 1548 - protein, 7 aa, synthetic construct
  REGION 1..7: note = n-mer motif
PTMSSLN

SEQ ID NO: 1549 - protein, 7 aa, synthetic construct
  REGION 1..7: note = n-mer motif
DITNQSY

SEQ ID NO: 1550 - protein, 7 aa, synthetic construct
  REGION 1..7: note = n-mer motif
LVKPETW

SEQ ID NO: 1551 - protein, 7 aa, synthetic construct
  REGION 1..7: note = n-mer motif
GTSLENR

SEQ ID NO: 1552 - protein, 7 aa, synthetic construct
  REGION 1..7: note = n-mer motif
AAGNPTR

SEQ ID NO: 1553 - protein, 7 aa, synthetic construct
  REGION 1..7: note = n-mer motif
HNVGLGH

SEQ ID NO: 1554 - protein, 7 aa, synthetic construct
  REGION 1..7: note = n-mer motif
VSTTTDR

SEQ ID NO: 1555 - protein, 7 aa, synthetic construct
  REGION 1..7: note = n-mer motif
YLSSGKM

SEQ ID NO: 1556 - protein, 7 aa, synthetic construct
  REGION 1..7: note = n-mer motif
DSRNAAL

SEQ ID NO: 1557 - protein, 7 aa, synthetic construct
  REGION 1..7: note = n-mer motif
VERNTDM

SEQ ID NO: 1558 - protein, 7 aa, synthetic construct
  REGION 1..7: note = n-mer motif
TVGSNSI

SEQ ID NO: 1559 - protein, 7 aa, synthetic construct
  REGION 1..7: note = n-mer motif
VRSGNKP

SEQ ID NO: 1560 - protein, 7 aa, synthetic construct
  REGION 1..7: note = n-mer motif
GSSGNSG

SEQ ID NO: 1561 - protein, 7 aa, synthetic construct
  REGION 1..7: note = n-mer motif
STSIGVV

SEQ ID NO: 1562 - protein, 7 aa, synthetic construct
  REGION 1..7: note = n-mer motif
PSQSRSL

SEQ ID NO: 1563 - protein, 7 aa, synthetic construct
  REGION 1..7: note = n-mer motif
RNENLNN

SEQ ID NO: 1564 - protein, 7 aa, synthetic construct
  REGION 1..7: note = n-mer motif
SLGKREE

SEQ ID NO: 1565 - protein, 7 aa, synthetic construct
  REGION 1..7: note = n-mer motif
SRLDSSS

SEQ ID NO: 1566 - protein, 7 aa, synthetic construct
  REGION 1..7: note = n-mer motif
DSTYVLA

SEQ ID NO: 1567 - protein, 7 aa, synthetic construct
  REGION 1..7: note = n-mer motif
ERNPISD

SEQ ID NO: 1568 - protein, 7 aa, synthetic construct
  REGION 1..7: note = n-mer motif
VSSGHTK

SEQ ID NO: 1569 - protein, 7 aa, synthetic construct
  REGION 1..7: note = n-mer motif
KYTESNA

SEQ ID NO: 1570 - protein, 7 aa, synthetic construct
  REGION 1..7: note = n-mer motif
NRNSVGT

SEQ ID NO: 1571 - protein, 7 aa, synthetic construct
  REGION 1..7: note = n-mer motif
HESHYVS

SEQ ID NO: 1572 - protein, 7 aa, synthetic construct
  REGION 1..7: note = n-mer motif
TTGGTGM

SEQ ID NO: 1573 - protein, 7 aa, synthetic construct
  REGION 1..7: note = n-mer motif
ATDKMTP

SEQ ID NO: 1574 - protein, 7 aa, synthetic construct
  REGION 1..7: note = n-mer motif
SASSGAT

SEQ ID NO: 1575 - protein, 7 aa, synthetic construct
  REGION 1..7: note = n-mer motif
STTTGHM

SEQ ID NO: 1576 - protein, 7 aa, synthetic construct
  REGION 1..7: note = n-mer motif
IIASSTT

SEQ ID NO: 1577 - protein, 7 aa, synthetic construct
  REGION 1..7: note = n-mer motif
DTGSRIA

SEQ ID NO: 1578 - protein, 7 aa, synthetic construct
  REGION 1..7: note = n-mer motif
WADDSQR

SEQ ID NO: 1579 - protein, 7 aa, synthetic construct
  REGION 1..7: note = n-mer motif
RGNTLEM

SEQ ID NO: 1580 - protein, 7 aa, synthetic construct
  REGION 1..7: note = n-mer motif
NLQVNAN

SEQ ID NO: 1581 - protein, 7 aa, synthetic construct
  REGION 1..7: note = n-mer motif
ATTQLMT

SEQ ID NO: 1582 - protein, 7 aa, synthetic construct
  REGION 1..7: note = n-mer motif
ADTNIIV

SEQ ID NO: 1583 - protein, 7 aa, synthetic construct
  REGION 1..7: note = n-mer motif
AITITQK

SEQ ID NO: 1584 - protein, 7 aa, synthetic construct
  REGION 1..7: note = n-mer motif
DSNKGAT

SEQ ID NO: 1585 - protein, 7 aa, synthetic construct
  REGION 1..7: note = n-mer motif
GNASGNP

SEQ ID NO: 1586 - protein, 7 aa, synthetic construct
  REGION 1..7: note = n-mer motif
TMGAKGT

SEQ ID NO: 1587 - protein, 7 aa, synthetic construct
  REGION 1..7: note = n-mer motif
YLQTGTL

SEQ ID NO: 1588 - protein, 7 aa, synthetic construct
  REGION 1..7: note = n-mer motif
ALHTKDL

SEQ ID NO: 1589 - protein, 7 aa, synthetic construct
  REGION 1..7: note = n-mer motif
VDKSEAV

SEQ ID NO: 1590 - protein, 7 aa, synthetic construct
  REGION 1..7: note = n-mer motif
GRTDLMA

SEQ ID NO: 1591 - protein, 7 aa, synthetic construct
  REGION 1..7: note = n-mer motif
GTEPRTA

SEQ ID NO: 1592 - protein, 7 aa, synthetic construct
  REGION 1..7: note = n-mer motif
RGDMSRE

SEQ ID NO: 1593 - protein, 7 aa, synthetic construct
  REGION 1..7: note = n-mer motif
RGDTKSK

SEQ ID NO: 1594 - protein, 7 aa, synthetic construct
  REGION 1..7: note = n-mer motif
GTLASMS

SEQ ID NO: 1595 - protein, 7 aa, synthetic construct
  REGION 1..7: note = n-mer motif
QKSVTYS

SEQ ID NO: 1596 - protein, 7 aa, synthetic construct
  REGION 1..7: note = n-mer motif
STGQTLV

SEQ ID NO: 1597 - protein, 7 aa, synthetic construct
  REGION 1..7: note = n-mer motif
SHINMGS

SEQ ID NO: 1598 - protein, 7 aa, synthetic construct
  REGION 1..7: note = n-mer motif
ALNGTGN

SEQ ID NO: 1599 - protein, 7 aa, synthetic construct
  REGION 1..7: note = n-mer motif
TTSSNQH

SEQ ID NO: 1600 - protein, 7 aa, synthetic construct
  REGION 1..7: note = n-mer motif
KNYASTD

SEQ ID NO: 1601 - protein, 7 aa, synthetic construct
  REGION 1..7: note = n-mer motif
ESTSRTY

SEQ ID NO: 1602 - protein, 7 aa, synthetic construct
  REGION 1..7: note = n-mer motif
PRSITEL

SEQ ID NO: 1603 - protein, 7 aa, synthetic construct
  REGION 1..7: note = n-mer motif
YIAGGEK

SEQ ID NO: 1604 - protein, 7 aa, synthetic construct
  REGION 1..7: note = n-mer motif
TSNYMHE

SEQ ID NO: 1605 - protein, 7 aa, synthetic construct
  REGION 1..7: note = n-mer motif
LDPNSTR

SEQ ID NO: 1606 - protein, 7 aa, synthetic construct
  REGION 1..7: note = n-mer motif
HSDMGSS

SEQ ID NO: 1607 - protein, 7 aa, synthetic construct
  REGION 1..7: note = n-mer motif
DTANRST

SEQ ID NO: 1608 - protein, 7 aa, synthetic construct
  REGION 1..7: note = n-mer motif
NAGHSGQ

SEQ ID NO: 1609 - protein, 7 aa, synthetic construct
  REGION 1..7: note = n-mer motif
SLGSDRM

SEQ ID NO: 1610 - protein, 7 aa, synthetic construct
  REGION 1..7: note = n-mer motif
DNQQALA

SEQ ID NO: 1611 - protein, 7 aa, synthetic construct
  REGION 1..7: note = n-mer motif
PSSAGST

SEQ ID NO: 1612 - protein, 7 aa, synthetic construct
  REGION 1..7: note = n-mer motif
DRKGYDA

SEQ ID NO: 1613 - protein, 7 aa, synthetic construct
  REGION 1..7: note = n-mer motif
GGNQNLT

SEQ ID NO: 1614 - protein, 7 aa, synthetic construct
  REGION 1..7: note = n-mer motif
VNLNETE

SEQ ID NO: 1615 - protein, 7 aa, synthetic construct
  REGION 1..7: note = n-mer motif
SPGNGLL

SEQ ID NO: 1616 - protein, 7 aa, synthetic construct
  REGION 1..7: note = n-mer motif
SVGDLTK

SEQ ID NO: 1617 - protein, 7 aa, synthetic construct
  REGION 1..7: note = n-mer motif
RYESVGL

SEQ ID NO: 1618 - protein, 7 aa, synthetic construct
  REGION 1..7: note = n-mer motif
TRELTKN

SEQ ID NO: 1619 - protein, 7 aa, synthetic construct
  REGION 1..7: note = n-mer motif
TPTNGNP

SEQ ID NO: 1620 - protein, 7 aa, synthetic construct
  REGION 1..7: note = n-mer motif
ATDQRSR

SEQ ID NO: 1621 - protein, 7 aa, synthetic construct
  REGION 1..7: note = n-mer motif
GTSAESR

SEQ ID NO: 1622 - protein, 7 aa, synthetic construct
  REGION 1..7: note = n-mer motif
RMLSTLP

SEQ ID NO: 1623 - protein, 7 aa, synthetic construct
  REGION 1..7: note = n-mer motif
GINSSHF

SEQ ID NO: 1624 - protein, 7 aa, synthetic construct
  REGION 1..7: note = n-mer motif
SSSTEGQ

SEQ ID NO: 1625 - protein, 7 aa, synthetic construct
  REGION 1..7: note = n-mer motif
DKQQTGQ

SEQ ID NO: 1626 - protein, 7 aa, synthetic construct
  REGION 1..7: note = n-mer motif
TQHLPST

SEQ ID NO: 1627 - protein, 7 aa, synthetic construct
  REGION 1..7: note = n-mer motif
GLGQPQL

SEQ ID NO: 1628 - protein, 7 aa, synthetic construct
  REGION 1..7: note = n-mer motif
VTNESRA

SEQ ID NO: 1629 - protein, 7 aa, synthetic construct
  REGION 1..7: note = n-mer motif
GNSNYRE

SEQ ID NO: 1630 - protein, 7 aa, synthetic construct
  REGION 1..7: note = n-mer motif
WNAENSK

SEQ ID NO: 1631 - protein, 7 aa, synthetic construct
  REGION 1..7: note = n-mer motif
PGSQRQD

SEQ ID NO: 1632 - protein, 7 aa, synthetic construct
  REGION 1..7: note = n-mer motif
HTYSQAD

SEQ ID NO: 1633 - protein, 7 aa, synthetic construct
  REGION 1..7: note = n-mer motif
TAGNLRS

SEQ ID NO: 1634 - protein, 7 aa, synthetic construct
  REGION 1..7: note = n-mer motif
GRHLQSD

SEQ ID NO: 1635 - protein, 7 aa, synthetic construct
  REGION 1..7: note = n-mer motif
NNAHTAT

SEQ ID NO: 1636 - protein, 7 aa, synthetic construct
  REGION 1..7: note = n-mer motif
STSQENR

SEQ ID NO: 1637 - protein, 7 aa, synthetic construct
  REGION 1..7: note = n-mer motif
RGDTMNY

SEQ ID NO: 1638 - protein, 7 aa, synthetic construct
  REGION 1..7: note = n-mer motif
PVATQHA

SEQ ID NO: 1639 - protein, 7 aa, synthetic construct
  REGION 1..7: note = n-mer motif
GHLNAPT

SEQ ID NO: 1640 - protein, 7 aa, synthetic construct
  REGION 1..7: note = n-mer motif
QILNYSV

SEQ ID NO: 1641 - protein, 7 aa, synthetic construct
  REGION 1..7: note = n-mer motif
QNHASGE

SEQ ID NO: 1642 - protein, 7 aa, synthetic construct
  REGION 1..7: note = n-mer motif
GLTGREL

SEQ ID NO: 1643 - protein, 7 aa, synthetic construct
  REGION 1..7: note = n-mer motif
DVAVTQH

SEQ ID NO: 1644 - protein, 7 aa, synthetic construct
  REGION 1..7: note = n-mer motif
ATYTGRT

SEQ ID NO: 1645 - protein, 7 aa, synthetic construct
  REGION 1..7: note = n-mer motif
KELQWQR

SEQ ID NO: 1646 - protein, 7 aa, synthetic construct
  REGION 1..7: note = n-mer motif
ASYSSMV

SEQ ID NO: 1647 - protein, 7 aa, synthetic construct
  REGION 1..7: note = n-mer motif
VISHGAL

SEQ ID NO: 1648 - protein, 7 aa, synthetic construct
  REGION 1..7: note = n-mer motif
PIHHGSS

SEQ ID NO: 1649 - protein, 7 aa, synthetic construct
  REGION 1..7: note = n-mer motif
VDKNHPL

SEQ ID NO: 1650 - protein, 7 aa, synthetic construct
  REGION 1..7: note = n-mer motif
TSGDRYT

SEQ ID NO: 1651 - protein, 7 aa, synthetic construct
  REGION 1..7: note = n-mer motif
GTKSWPV

SEQ ID NO: 1652 - protein, 7 aa, synthetic construct
  REGION 1..7: note = n-mer motif
YNAHESF

SEQ ID NO: 1653 - protein, 7 aa, synthetic construct
  REGION 1..7: note = n-mer motif
RVHDTPS

SEQ ID NO: 1654 - protein, 7 aa, synthetic construct
  REGION 1..7: note = n-mer motif
AQIESGR

SEQ ID NO: 1655 - protein, 7 aa, synthetic construct
  REGION 1..7: note = n-mer motif
WKDNMRM

SEQ ID NO: 1656 - protein, 7 aa, synthetic construct
  REGION 1..7: note = n-mer motif
MPSEPPG

SEQ ID NO: 1657 - protein, 7 aa, synthetic construct
  REGION 1..7: note = n-mer motif
RGDYPTS

SEQ ID NO: 1658 - protein, 7 aa, synthetic construct
  REGION 1..7: note = n-mer motif
FHNESYG

SEQ ID NO: 1659 - protein, 7 aa, synthetic construct
  REGION 1..7: note = n-mer motif
LNTMIDK

SEQ ID NO: 1660 - protein, 7 aa, synthetic construct
  REGION 1..7: note = n-mer motif
STLSQGA

SEQ ID NO: 1661 - protein, 7 aa, synthetic construct
  REGION 1..7: note = n-mer motif
PLHNIPP

SEQ ID NO: 1662 - protein, 7 aa, synthetic construct
  REGION 1..7: note = n-mer motif
ASSTFLP

SEQ ID NO: 1663 - protein, 7 aa, synthetic construct
  REGION 1..7: note = n-mer motif
MEGMGLG

SEQ ID NO: 1664 - protein, 7 aa, synthetic construct
  REGION 1..7: note = n-mer motif
KDYKPYA

SEQ ID NO: 1665 - protein, 7 aa, synthetic construct
  REGION 1..7: note = n-mer motif
NLQSGVQ

SEQ ID NO: 1666 - protein, 7 aa, synthetic construct
  REGION 1..7: note = n-mer motif
TTLSQQS

SEQ ID NO: 1667 - protein, 7 aa, synthetic construct
  REGION 1..7: note = n-mer motif
LMSSTSS

SEQ ID NO: 1668 - protein, 7 aa, synthetic construct
  REGION 1..7: note = n-mer motif
TGQGFSA

SEQ ID NO: 1669 - protein, 7 aa, synthetic construct
  REGION 1..7: note = n-mer motif
STIGNST

SEQ ID NO: 1670 - protein, 7 aa, synthetic construct
  REGION 1..7: note = n-mer motif
LRASEAP

SEQ ID NO: 1671 - protein, 7 aa, synthetic construct
  REGION 1..7: note = n-mer motif
QPNNGNH

SEQ ID NO: 1672 - protein, 7 aa, synthetic construct
  REGION 1..7: note = n-mer motif
SSDVTRQ

SEQ ID NO: 1673 - protein, 7 aa, synthetic construct
  REGION 1..7: note = n-mer motif
RGDATEM

SEQ ID NO: 1674 - protein, 7 aa, synthetic construct
  REGION 1..7: note = n-mer motif
YRGREDW

SEQ ID NO: 1675 - protein, 7 aa, synthetic construct
  REGION 1..7: note = n-mer motif
SLQQSQL

SEQ ID NO: 1676 - protein, 7 aa, synthetic construct
  REGION 1..7: note = n-mer motif
KPTANDW

SEQ ID NO: 1677 - protein, 7 aa, synthetic construct
  REGION 1..7: note = n-mer motif
RLTDTMH

SEQ ID NO: 1678 - protein, 7 aa, synthetic construct
  REGION 1..7: note = n-mer motif
LHGNYSP

SEQ ID NO: 1679 - protein, 7 aa, synthetic construct
  REGION 1..7: note = n-mer motif
IPVGAMA

SEQ ID NO: 1680 - protein, 7 aa, synthetic construct
  REGION 1..7: note = n-mer motif
PNTASNF

SEQ ID NO: 1681 - protein, 7 aa, synthetic construct
  REGION 1..7: note = n-mer motif
TSREVKG

SEQ ID NO: 1682 - protein, 7 aa, synthetic construct
  REGION 1..7: note = n-mer motif
DTSSGNR

SEQ ID NO: 1683 - protein, 7 aa, synthetic construct
  REGION 1..7: note = n-mer motif
EAVTSKW

SEQ ID NO: 1684 - protein, 7 aa, synthetic construct
  REGION 1..7: note = n-mer motif
LITATTN

SEQ ID NO: 1685 - protein, 7 aa, synthetic construct
  REGION 1..7: note = n-mer motif
DGGRSGI

SEQ ID NO: 1686 - protein, 7 aa, synthetic construct
  REGION 1..7: note = n-mer motif
FMEVMKN

SEQ ID NO: 1687 - protein, 7 aa, synthetic construct
  REGION 1..7: note = n-mer motif
SYQNPPP

SEQ ID NO: 1688 - protein, 7 aa, synthetic construct
  REGION 1..7: note = n-mer motif
TNVTFKL

SEQ ID NO: 1689 - protein, 7 aa, synthetic construct
  REGION 1..7: note = n-mer motif
ISTHTMT

SEQ ID NO: 1690 - protein, 7 aa, synthetic construct
  REGION 1..7: note = n-mer motif
ETQGARY

SEQ ID NO: 1691 - protein, 7 aa, synthetic construct
  REGION 1..7: note = n-mer motif
AAYEHAP

SEQ ID NO: 1692 - protein, 7 aa, synthetic construct
  REGION 1..7: note = n-mer motif
STNDRAL

SEQ ID NO: 1693 - protein, 7 aa, synthetic construct
  REGION 1..7: note = n-mer motif
FTERALQ

SEQ ID NO: 1694 - protein, 7 aa, synthetic construct
  REGION 1..7: note = n-mer motif
VAGLVDI

SEQ ID NO: 1695 - protein, 7 aa, synthetic construct
  REGION 1..7: note = n-mer motif
SSVTNLA

SEQ ID NO: 1696 - protein, 7 aa, synthetic construct
  REGION 1..7: note = n-mer motif
DTTTGHL

SEQ ID NO: 1697 - protein, 7 aa, synthetic construct
  REGION 1..7: note = n-mer motif
TRNLSES

SEQ ID NO: 1698 - protein, 7 aa, synthetic construct
  REGION 1..7: note = n-mer motif
QVNVGPG

SEQ ID NO: 1699 - protein, 7 aa, synthetic construct
  REGION 1..7: note = n-mer motif
KQTMSDT

SEQ ID NO: 1700 - protein, 7 aa, synthetic construct
  REGION 1..7: note = n-mer motif
MSTTSKT

SEQ ID NO: 1701 - protein, 7 aa, synthetic construct
  REGION 1..7: note = n-mer motif
TTIGTNQ

SEQ ID NO: 1702 - protein, 7 aa, synthetic construct
  REGION 1..7: note = n-mer motif
GTLTPNL

SEQ ID NO: 1703 - protein, 7 aa, synthetic construct
  REGION 1..7: note = n-mer motif
FDSYNIV

SEQ ID NO: 1704 - protein, 7 aa, synthetic construct
  REGION 1..7: note = n-mer motif
RGAPEQA

SEQ ID NO: 1705 - protein, 7 aa, synthetic construct
  REGION 1..7: note = n-mer motif
IENVNHL

SEQ ID NO: 1706 - protein, 7 aa, synthetic construct
  REGION 1..7: note = n-mer motif
RSLESQA

SEQ ID NO: 1707 - protein, 7 aa, synthetic construct
  REGION 1..7: note = n-mer motif
QYTSLSP

SEQ ID NO: 1708 - protein, 7 aa, synthetic construct
  REGION 1..7: note = n-mer motif
TKGYNDL

SEQ ID NO: 1709 - protein, 7 aa, synthetic construct
  REGION 1..7: note = n-mer motif
VASMVHN

SEQ ID NO: 1710 - protein, 7 aa, synthetic construct
  REGION 1..7: note = n-mer motif
STTHTSA

SEQ ID NO: 1711 - protein, 7 aa, synthetic construct
  REGION 1..7: note = n-mer motif
LAHPQPN

SEQ ID NO: 1712 - protein, 7 aa, synthetic construct
  REGION 1..7: note = n-mer motif
SINNIGA

SEQ ID NO: 1713 - protein, 7 aa, synthetic construct
  REGION 1..7: note = n-mer motif
AIDSIKM

SEQ ID NO: 1714 - protein, 7 aa, synthetic construct
  REGION 1..7: note = n-mer motif
SMYGQAG

SEQ ID NO: 1715 - protein, 7 aa, synthetic construct
  REGION 1..7: note = n-mer motif
EYANAKT

SEQ ID NO: 1716 - protein, 7 aa, synthetic construct
  REGION 1..7: note = n-mer motif
YRASDVA

SEQ ID NO: 1717 - protein, 7 aa, synthetic construct
  REGION 1..7: note = n-mer motif
VSLESRL

SEQ ID NO: 1718 - protein, 7 aa, synthetic construct
  REGION 1..7: note = n-mer motif
IETSSRS

SEQ ID NO: 1719 - protein, 7 aa, synthetic construct
  REGION 1..7: note = n-mer motif
MGVKPEQ

SEQ ID NO: 1720 - protein, 7 aa, synthetic construct
  REGION 1..7: note = n-mer motif
ALPSRER

SEQ ID NO: 1721 - protein, 7 aa, synthetic construct
  REGION 1..7: note = n-mer motif
GTGSSAH

SEQ ID NO: 1722 - protein, 7 aa, synthetic construct
  REGION 1..7: note = n-mer motif
QTNTNDR

SEQ ID NO: 1723 - protein, 7 aa, synthetic construct
  REGION 1..7: note = n-mer motif
VLHSVSA

SEQ ID NO: 1724 - protein, 7 aa, synthetic construct
  REGION 1..7: note = n-mer motif
PYSATDR

SEQ ID NO: 1725 - protein, 7 aa, synthetic construct
  REGION 1..7: note = n-mer motif
ANSGLHN

SEQ ID NO: 1726 - protein, 7 aa, synthetic construct
  REGION 1..7: note = n-mer motif
YESTHVN

SEQ ID NO: 1727 - protein, 7 aa, synthetic construct
  REGION 1..7: note = n-mer motif
NNALVGS

SEQ ID NO: 1728 - protein, 7 aa, synthetic construct
  REGION 1..7: note = n-mer motif
GINSSHI

SEQ ID NO: 1729 - protein, 7 aa, synthetic construct
  REGION 1..7: note = n-mer motif
SISDKNQ

SEQ ID NO: 1730 - protein, 7 aa, synthetic construct
  REGION 1..7: note = n-mer motif
DHQQALA

SEQ ID NO: 1731 - protein, 7 aa, synthetic construct
  REGION 1..7: note = n-mer motif
DSTKAMQ

SEQ ID NO: 1732 - protein, 7 aa, synthetic construct
  REGION 1..7: note = n-mer motif
TITSQSV

SEQ ID NO: 1733 - protein, 7 aa, synthetic construct
  REGION 1..7: note = n-mer motif
GARTILD

SEQ ID NO: 1734 - protein, 7 aa, synthetic construct
  REGION 1..7: note = n-mer motif
EHSPTTG

SEQ ID NO: 1735 - protein, 7 aa, synthetic construct
  REGION 1..7: note = n-mer motif
GLTGYPM

SEQ ID NO: 1736 - protein, 7 aa, synthetic construct
  REGION 1..7: note = n-mer motif
TMESGRH

SEQ ID NO: 1737 - protein, 7 aa, synthetic construct
  REGION 1..7: note = n-mer motif
SASKVEY

SEQ ID NO: 1738 - protein, 7 aa, synthetic construct
  REGION 1..7: note = n-mer motif
DKSNYSI

SEQ ID NO: 1739 - protein, 7 aa, synthetic construct
  REGION 1..7: note = n-mer motif
FNETAGR

SEQ ID NO: 1740 - protein, 7 aa, synthetic construct
  REGION 1..7: note = n-mer motif
QKSETYT

SEQ ID NO: 1741 - protein, 7 aa, synthetic construct
  REGION 1..7: note = n-mer motif
ALTRMPN

SEQ ID NO: 1742 - protein, 7 aa, synthetic construct
  REGION 1..7: note = n-mer motif
RNGSAQS

SEQ ID NO: 1743 - protein, 7 aa, synthetic construct
  REGION 1..7: note = n-mer motif
ARDTPGI

SEQ ID NO: 1744 - protein, 7 aa, synthetic construct
  REGION 1..7: note = n-mer motif
IVNAEIY

SEQ ID NO: 1745 - protein, 7 aa, synthetic construct
  REGION 1..7: note = n-mer motif
RQGDLKE

SEQ ID NO: 1746 - protein, 7 aa, synthetic construct
  REGION 1..7: note = n-mer motif
RNNPSHD

SEQ ID NO: 1747 - protein, 7 aa, synthetic construct
  REGION 1..7: note = n-mer motif
LAHNYLS

SEQ ID NO: 1748 - protein, 7 aa, synthetic construct
  REGION 1..7: note = n-mer motif
NTHNLQM

SEQ ID NO: 1749 - protein, 7 aa, synthetic construct
  REGION 1..7: note = n-mer motif
RGDHSTQ

SEQ ID NO: 1750 - protein, 7 aa, synthetic construct
  REGION 1..7: note = n-mer motif
LHGVSSI

SEQ ID NO: 1751 - protein, 7 aa, synthetic construct
  REGION 1..7: note = n-mer motif
GINHVAS

SEQ ID NO: 1752 - protein, 7 aa, synthetic construct
  REGION 1..7: note = n-mer motif
TDKLQGV

SEQ ID NO: 1753 - protein, 7 aa, synthetic construct
  REGION 1..7: note = n-mer motif
GTSIDYV

SEQ ID NO: 1754 - protein, 7 aa, synthetic construct
  REGION 1..7: note = n-mer motif
SNTAPPP

SEQ ID NO: 1755 - protein, 7 aa, synthetic construct
  REGION 1..7: note = n-mer motif
TAKSYGP

SEQ ID NO: 1756 - protein, 7 aa, synthetic construct
  REGION 1..7: note = n-mer motif
DHQQALA

SEQ ID NO: 1757 - protein, 7 aa, synthetic construct
  REGION 1..7: note = n-mer motif
TQVVART

SEQ ID NO: 1758 - protein, 7 aa, synthetic construct
  REGION 1..7: note = n-mer motif
SPPSTSG

SEQ ID NO: 1759 - protein, 7 aa, synthetic construct
  REGION 1..7: note = n-mer motif
PMRTPPY

SEQ ID NO: 1760 - protein, 7 aa, synthetic construct
  REGION 1..7: note = n-mer motif
AAGNTTR

SEQ ID NO: 1761 - protein, 6 aa, synthetic construct
  REGION 1..6: note = n-mer motif
RGDSTP

SEQ ID NO: 1762 - protein, 7 aa, synthetic construct
  REGION 1..7: note = n-mer motif
LAKTVAI

SEQ ID NO: 1763 - protein, 7 aa, synthetic construct
  REGION 1..7: note = n-mer motif
SKSENLQ

SEQ ID NO: 1764 - protein, 7 aa, synthetic construct
  REGION 1..7: note = n-mer motif
TQTSYAT

SEQ ID NO: 1765 - protein, 7 aa, synthetic construct
  REGION 1..7: note = n-mer motif
TGDRTSV

SEQ ID NO: 1766 - protein, 7 aa, synthetic construct
  REGION 1..7: note = n-mer motif
ISQGSSL

SEQ ID NO: 1767 - protein, 7 aa, synthetic construct
  REGION 1..7: note = n-mer motif
LVQMGSV

SEQ ID NO: 1768 - protein, 7 aa, synthetic construct
  REGION 1..7: note = n-mer motif
LSATSTM

SEQ ID NO: 1769 - protein, 7 aa, synthetic construct
  REGION 1..7: note = n-mer motif
QNHNELK

SEQ ID NO: 1770 - protein, 7 aa, synthetic construct
  REGION 1..7: note = n-mer motif
RGAPEHA

SEQ ID NO: 1771 - protein, 7 aa, synthetic construct
  REGION 1..7: note = n-mer motif
SSFGKDN

SEQ ID NO: 1772 - protein, 7 aa, synthetic construct
  REGION 1..7: note = n-mer motif
NANAGGN

SEQ ID NO: 1773 - protein, 7 aa, synthetic construct
  REGION 1..7: note = n-mer motif
DHHPQSR

SEQ ID NO: 1774 - protein, 7 aa, synthetic construct
  REGION 1..7: note = n-mer motif
MRHEAPL

SEQ ID NO: 1775 - protein, 7 aa, synthetic construct
  REGION 1..7: note = n-mer motif
KGDGAYE

SEQ ID NO: 1776 - protein, 7 aa, synthetic construct
  REGION 1..7: note = n-mer motif
PMNGILL

SEQ ID NO: 1777 - protein, 7 aa, synthetic construct
  REGION 1..7: note = n-mer motif
SSGGMKA

SEQ ID NO: 1778 - protein, 7 aa, synthetic construct
  REGION 1..7: note = n-mer motif
VLVTQNH

SEQ ID NO: 1779 - protein, 7 aa, synthetic construct
  REGION 1..7: note = n-mer motif
EINNRTG

SEQ ID NO: 1780 - protein, 7 aa, synthetic construct
  REGION 1..7: note = n-mer motif
LPTGVLP

SEQ ID NO: 1781 - protein, 7 aa, synthetic construct
  REGION 1..7: note = n-mer motif
AYGIREV

SEQ ID NO: 1782 - protein, 7 aa, synthetic construct
  REGION 1..7: note = n-mer motif
STNSIGA

SEQ ID NO: 1783 - protein, 7 aa, synthetic construct
  REGION 1..7: note = n-mer motif
VQLTHNG

SEQ ID NO: 1784 - protein, 7 aa, synthetic construct
  REGION 1..7: note = n-mer motif
VQLENAN

SEQ ID NO: 1785 - protein, 7 aa, synthetic construct
  REGION 1..7: note = n-mer motif
GKANDGS

SEQ ID NO: 1786 - protein, 7 aa, synthetic construct
  REGION 1..7: note = n-mer motif
TGVRETI

SEQ ID NO: 1787 - protein, 7 aa, synthetic construct
  REGION 1..7: note = n-mer motif
GLNQITS

SEQ ID NO: 1788 - protein, 7 aa, synthetic construct
  REGION 1..7: note = n-mer motif
TEKASPL

SEQ ID NO: 1789 - protein, 7 aa, synthetic construct
  REGION 1..7: note = n-mer motif
FLEGVAQ

SEQ ID NO: 1790 - protein, 7 aa, synthetic construct
  REGION 1..7: note = n-mer motif
TNYNIGP

SEQ ID NO: 1791 - protein, 7 aa, synthetic construct
  REGION 1..7: note = n-mer motif
RGDLTTT

SEQ ID NO: 1792 - protein, 7 aa, synthetic construct
  REGION 1..7: note = n-mer motif
MMNVSGH

SEQ ID NO: 1793 - protein, 7 aa, synthetic construct
  REGION 1..7: note = n-mer motif
SQSINGL

SEQ ID NO: 1794 - protein, 7 aa, synthetic construct
  REGION 1..7: note = n-mer motif
LTTLTNH

SEQ ID NO: 1795 - protein, 7 aa, synthetic construct
  REGION 1..7: note = n-mer motif
NSVQSTP

SEQ ID NO: 1796 - protein, 7 aa, synthetic construct
  REGION 1..7: note = n-mer motif
YNTDRTN

SEQ ID NO: 1797 - protein, 7 aa, synthetic construct
  REGION 1..7: note = n-mer motif
EKPQHNS

SEQ ID NO: 1798 - protein, 7 aa, synthetic construct
  REGION 1..7: note = n-mer motif
TMATNLS

SEQ ID NO: 1799 - protein, 7 aa, synthetic construct
  REGION 1..7: note = n-mer motif
VGTHLHS

SEQ ID NO: 1800 - protein, 7 aa, synthetic construct
  REGION 1..7: note = n-mer motif
DAHHSSS

SEQ ID NO: 1801 - protein, 7 aa, synthetic construct
  REGION 1..7: note = n-mer motif
LVGTLVY

SEQ ID NO: 1802 - protein, 7 aa, synthetic construct
  REGION 1..7: note = n-mer motif
YGVQANS

SEQ ID NO: 1803 - protein, 7 aa, synthetic construct
  REGION 1..7: note = n-mer motif
VLSDKAY

SEQ ID NO: 1804 - protein, 7 aa, synthetic construct
  REGION 1..7: note = n-mer motif
LEGQNKT

SEQ ID NO: 1805 - protein, 7 aa, synthetic construct
  REGION 1..7: note = n-mer motif
EVSNNNY

SEQ ID NO: 1806 - protein, 7 aa, synthetic construct
  REGION 1..7: note = n-mer motif
AHQQALA

SEQ ID NO: 1807 - protein, 7 aa, synthetic construct
  REGION 1..7: note = n-mer motif
LPTTLNH

SEQ ID NO: 1808 - protein, 7 aa, synthetic construct
  REGION 1..7: note = n-mer motif
YIAGGEQ

SEQ ID NO: 1809 - protein, 7 aa, synthetic construct
  REGION 1..7: note = n-mer motif
NSGTLYQ

SEQ ID NO: 1810 - protein, 7 aa, synthetic construct
  REGION 1..7: note = n-mer motif
RGLPDVN

SEQ ID NO: 1811 - protein, 7 aa, synthetic construct
  REGION 1..7: note = n-mer motif
NQQLSHS

SEQ ID NO: 1812 - protein, 7 aa, synthetic construct
  REGION 1..7: note = n-mer motif
NPSYDHR

SEQ ID NO: 1813 - protein, 7 aa, synthetic construct
  REGION 1..7: note = n-mer motif
IDSDTFV

SEQ ID NO: 1814 - protein, 7 aa, synthetic construct
  REGION 1..7: note = n-mer motif
TAYLAGL

SEQ ID NO: 1815 - protein, 7 aa, synthetic construct
  REGION 1..7: note = n-mer motif
HSNVSLE

SEQ ID NO: 1816 - protein, 7 aa, synthetic construct
  REGION 1..7: note = n-mer motif
GNNLSLS

SEQ ID NO: 1817 - protein, 7 aa, synthetic construct
  REGION 1..7: note = n-mer motif
VMDTHGM

SEQ ID NO: 1818 - protein, 7 aa, synthetic construct
  REGION 1..7: note = n-mer motif
AYNMSSV

SEQ ID NO: 1819 - protein, 7 aa, synthetic construct
  REGION 1..7: note = n-mer motif
TNAISQT

SEQ ID NO: 1820 - protein, 7 aa, synthetic construct
  REGION 1..7: note = n-mer motif
ATHAMRP

SEQ ID NO: 1821 - protein, 7 aa, synthetic construct
  REGION 1..7: note = n-mer motif
MLNNTMM

SEQ ID NO: 1822 - protein, 7 aa, synthetic construct
  REGION 1..7: note = n-mer motif
ISSGILS

SEQ ID NO: 1823 - protein, 7 aa, synthetic construct
  REGION 1..7: note = n-mer motif
RQGSLMI

SEQ ID NO: 1824 - protein, 7 aa, synthetic construct
  REGION 1..7: note = n-mer motif
TTDKGIN

SEQ ID NO: 1825 - protein, 7 aa, synthetic construct
  REGION 1..7: note = n-mer motif
HNLMTQI

SEQ ID NO: 1826 - protein, 7 aa, synthetic construct
  REGION 1..7: note = n-mer motif
NQNTYEL

SEQ ID NO: 1827 - protein, 7 aa, synthetic construct
  REGION 1..7: note = n-mer motif
ANTVTER

SEQ ID NO: 1828 - protein, 7 aa, synthetic construct
  REGION 1..7: note = n-mer motif
STLQTNG

SEQ ID NO: 1829 - protein, 7 aa, synthetic construct
  REGION 1..7: note = n-mer motif
PNEYKAP

SEQ ID NO: 1830 - protein, 7 aa, synthetic construct
  REGION 1..7: note = n-mer motif
MQTRSDT

SEQ ID NO: 1831 - protein, 7 aa, synthetic construct
  REGION 1..7: note = n-mer motif
GTGYAGS

SEQ ID NO: 1832 - protein, 7 aa, synthetic construct
  REGION 1..7: note = n-mer motif
MGMQNTH

SEQ ID NO: 1833 - protein, 7 aa, synthetic construct
  REGION 1..7: note = n-mer motif
SSKERTS

SEQ ID NO: 1834 - protein, 7 aa, synthetic construct
  REGION 1..7: note = n-mer motif
RTDTPYT

SEQ ID NO: 1835 - protein, 7 aa, synthetic construct
  REGION 1..7: note = n-mer motif
TALRDNK

SEQ ID NO: 1836 - protein, 7 aa, synthetic construct
  REGION 1..7: note = n-mer motif
RMSESSD

SEQ ID NO: 1837 - protein, 7 aa, synthetic construct
  REGION 1..7: note = n-mer motif
NQSISMD

SEQ ID NO: 1838 - protein, 7 aa, synthetic construct
  REGION 1..7: note = n-mer motif
SLGHSNN

SEQ ID NO: 1839 - protein, 7 aa, synthetic construct
  REGION 1..7: note = n-mer motif
LNSGGAM

SEQ ID NO: 1840 - protein, 7 aa, synthetic construct
  REGION 1..7: note = n-mer motif
NEQFEKV

SEQ ID NO: 1841 - protein, 7 aa, synthetic construct
  REGION 1..7: note = n-mer motif
MMANNMQ

SEQ ID NO: 1842 - protein, 7 aa, synthetic construct
  REGION 1..7: note = n-mer motif
SRREEQP

SEQ ID NO: 1843 - protein, 7 aa, synthetic construct
  REGION 1..7: note = n-mer motif
ATMTSST

SEQ ID NO: 1844 - protein, 7 aa, synthetic construct
  REGION 1..7: note = n-mer motif
RGSDGGL

SEQ ID NO: 1845 - protein, 7 aa, synthetic construct
  REGION 1..7: note = n-mer motif
SLTPNNL

SEQ ID NO: 1846 - protein, 7 aa, synthetic construct
  REGION 1..7: note = n-mer motif
ATLSPHA

SEQ ID NO: 1847 - protein, 7 aa, synthetic construct
  REGION 1..7: note = n-mer motif
YLQEKFP

SEQ ID NO: 1848 - protein, 7 aa, synthetic construct
  REGION 1..7: note = n-mer motif
GTGYPNQ

SEQ ID NO: 1849 - protein, 7 aa, synthetic construct
  REGION 1..7: note = n-mer motif
NYPSVQE

SEQ ID NO: 1850 - protein, 7 aa, synthetic construct
  REGION 1..7: note = n-mer motif
TDASGRS

SEQ ID NO: 1851 - protein, 7 aa, synthetic construct
  REGION 1..7: note = n-mer motif
RVITAGD

SEQ ID NO: 1852 - protein, 7 aa, synthetic construct
  REGION 1..7: note = n-mer motif
VTVSNSL

SEQ ID NO: 1853 - protein, 7 aa, synthetic construct
  REGION 1..7: note = n-mer motif
LLTAPHR

SEQ ID NO: 1854 - protein, 7 aa, synthetic construct
  REGION 1..7: note = n-mer motif
SIANHMI

SEQ ID NO: 1855 - protein, 7 aa, synthetic construct
  REGION 1..7: note = n-mer motif
MPSKGEV

SEQ ID NO: 1856 - protein, 7 aa, synthetic construct
  REGION 1..7: note = n-mer motif
NMTNERL

SEQ ID NO: 1857 - protein, 7 aa, synthetic construct
  REGION 1..7: note = n-mer motif
SFSSGIM

SEQ ID NO: 1858 - protein, 7 aa, synthetic construct
  REGION 1..7: note = n-mer motif
RDRQDSV

SEQ ID NO: 1859 - protein, 7 aa, synthetic construct
  REGION 1..7: note = n-mer motif
HGDRTAL

SEQ ID NO: 1860 - protein, 7 aa, synthetic construct
  REGION 1..7: note = n-mer motif
EVRGSVP

SEQ ID NO: 1861 - protein, 7 aa, synthetic construct
  REGION 1..7: note = n-mer motif
LISTGNN

SEQ ID NO: 1862 - protein, 7 aa, synthetic construct
  REGION 1..7: note = n-mer motif
PTSGDKP

SEQ ID NO: 1863 - protein, 7 aa, synthetic construct
  REGION 1..7: note = n-mer motif
KADHSGA

SEQ ID NO: 1864 - protein, 7 aa, synthetic construct
  REGION 1..7: note = n-mer motif
LNDVYRK

SEQ ID NO: 1865 - protein, 7 aa, synthetic construct
  REGION 1..7: note = n-mer motif
NSLQASA

SEQ ID NO: 1866 - protein, 7 aa, synthetic construct
  REGION 1..7: note = n-mer motif
YHNEIMT

SEQ ID NO: 1867 - protein, 7 aa, synthetic construct
  REGION 1..7: note = n-mer motif
NNTLNIL

SEQ ID NO: 1868 - protein, 7 aa, synthetic construct
  REGION 1..7: note = n-mer motif
SYGQGLE

SEQ ID NO: 1869 - protein, 7 aa, synthetic construct
  REGION 1..7: note = n-mer motif
MIKTNML

SEQ ID NO: 1870 - protein, 7 aa, synthetic construct
  REGION 1..7: note = n-mer motif
TEAGRPQ

SEQ ID NO: 1871 - protein, 7 aa, synthetic construct
  REGION 1..7: note = n-mer motif
RIDQTNV

SEQ ID NO: 1872 - protein, 7 aa, synthetic construct
  REGION 1..7: note = n-mer motif
EGHNRGI

SEQ ID NO: 1873 - protein, 7 aa, synthetic construct
  REGION 1..7: note = n-mer motif
MGTEYRM

SEQ ID NO: 1874 - protein, 7 aa, synthetic construct
  REGION 1..7: note = n-mer motif
SGMNSNK

SEQ ID NO: 1875 - protein, 7 aa, synthetic construct
  REGION 1..7: note = n-mer motif
LTNDNKL

SEQ ID NO: 1876 - protein, 7 aa, synthetic construct
  REGION 1..7: note = n-mer motif
LHNYQDR

SEQ ID NO: 1877 - protein, 7 aa, synthetic construct
  REGION 1..7: note = n-mer motif
KSNLEGK

SEQ ID NO: 1878 - protein, 7 aa, synthetic construct
  REGION 1..7: note = n-mer motif
LTGQNAI

SEQ ID NO: 1879 - protein, 7 aa, synthetic construct
  REGION 1..7: note = n-mer motif
HTVGAMH

SEQ ID NO: 1880 - protein, 7 aa, synthetic construct
  REGION 1..7: note = n-mer motif
LQLATSH

SEQ ID NO: 1881 - protein, 7 aa, synthetic construct
  REGION 1..7: note = n-mer motif
SLNGVLV

SEQ ID NO: 1882 - protein, 7 aa, synthetic construct
  REGION 1..7: note = n-mer motif
SHNQVNV

SEQ ID NO: 1883 - protein, 7 aa, synthetic construct
  REGION 1..7: note = n-mer motif
SLSTDVF

SEQ ID NO: 1884 - protein, 7 aa, synthetic construct
  REGION 1..7: note = n-mer motif
MVGRAEI

SEQ ID NO: 1885 - protein, 7 aa, synthetic construct
  REGION 1..7: note = n-mer motif
LSSMSTD

SEQ ID NO: 1886 - protein, 7 aa, synthetic construct
  REGION 1..7: note = n-mer motif
SYSTSTP

SEQ ID NO: 1887 - protein, 7 aa, synthetic construct
  REGION 1..7: note = n-mer motif
SELMVRP

SEQ ID NO: 1888 - protein, 7 aa, synthetic construct
  REGION 1..7: note = n-mer motif
WNGNATQ

SEQ ID NO: 1889 - protein, 7 aa, synthetic construct
  REGION 1..7: note = n-mer motif
MDTELYR

SEQ ID NO: 1890 - protein, 7 aa, synthetic construct
  REGION 1..7: note = n-mer motif
RTSPDTN

SEQ ID NO: 1891 - protein, 7 aa, synthetic construct
  REGION 1..7: note = n-mer motif
FSTQDIS

SEQ ID NO: 1892 - protein, 7 aa, synthetic construct
  REGION 1..7: note = n-mer motif
TTVLGNN

SEQ ID NO: 1893 - protein, 7 aa, synthetic construct
  REGION 1..7: note = n-mer motif
QRDAAYA

SEQ ID NO: 1894 - protein, 7 aa, synthetic construct
  REGION 1..7: note = n-mer motif
HQTVVPT

SEQ ID NO: 1895 - protein, 7 aa, synthetic construct
  REGION 1..7: note = n-mer motif
SNPGNHN

SEQ ID NO: 1896 - protein, 7 aa, synthetic construct
  REGION 1..7: note = n-mer motif
WETMAKP

SEQ ID NO: 1897 - protein, 7 aa, synthetic construct
  REGION 1..7: note = n-mer motif
GLYQNPT

SEQ ID NO: 1898 - protein, 7 aa, synthetic construct
  REGION 1..7: note = n-mer motif
LNLTNHN

SEQ ID NO: 1899 - protein, 7 aa, synthetic construct
  REGION 1..7: note = n-mer motif
MSLASTQ

SEQ ID NO: 1900 - protein, 7 aa, synthetic construct
  REGION 1..7: note = n-mer motif
TSQTVRV

SEQ ID NO: 1901 - protein, 7 aa, synthetic construct
  REGION 1..7: note = n-mer motif
GATVNTR

SEQ ID NO: 1902 - protein, 7 aa, synthetic construct
  REGION 1..7: note = n-mer motif
KGGNLTA

SEQ ID NO: 1903 - protein, 7 aa, synthetic construct
  REGION 1..7: note = n-mer motif
AWSQVLT

SEQ ID NO: 1904 - protein, 7 aa, synthetic construct
  REGION 1..7: note = n-mer motif
VEHVAHQ

SEQ ID NO: 1905 - protein, 7 aa, synthetic construct
  REGION 1..7: note = n-mer motif
LMSSYSS

SEQ ID NO: 1906 - protein, 7 aa, synthetic construct
  REGION 1..7: note = n-mer motif
SLGGNPP

SEQ ID NO: 1907 - protein, 7 aa, synthetic construct
  REGION 1..7: note = n-mer motif
KNENTNY

SEQ ID NO: 1908 - protein, 7 aa, synthetic construct
  REGION 1..7: note = n-mer motif
ILDNHRF

SEQ ID NO: 1909 - protein, 7 aa, synthetic construct
  REGION 1..7: note = n-mer motif
NSSHVNS

SEQ ID NO: 1910 - protein, 7 aa, synthetic construct
  REGION 1..7: note = n-mer motif
QVQHERV

SEQ ID NO: 1911 - protein, 7 aa, synthetic construct
  REGION 1..7: note = n-mer motif
LGGTLGI

SEQ ID NO: 1912 - protein, 7 aa, synthetic construct
  REGION 1..7: note = n-mer motif
TQERPLI

SEQ ID NO: 1913 - protein, 7 aa, synthetic construct
  REGION 1..7: note = n-mer motif
RKTEDRM

SEQ ID NO: 1914 - protein, 7 aa, synthetic construct
  REGION 1..7: note = n-mer motif
TELTARN

SEQ ID NO: 1915 - protein, 7 aa, synthetic construct
  REGION 1..7: note = n-mer motif
RGDNTYS

SEQ ID NO: 1916 - protein, 7 aa, synthetic construct
  REGION 1..7: note = n-mer motif
QSNTNNS

SEQ ID NO: 1917 - protein, 7 aa, synthetic construct
  REGION 1..7: note = n-mer motif
ASYSISD

SEQ ID NO: 1918 - protein, 7 aa, synthetic construct
  REGION 1..7: note = n-mer motif
SEHHAGI

SEQ ID NO: 1919 - protein, 7 aa, synthetic construct
  REGION 1..7: note = n-mer motif
RGAPEHA

SEQ ID NO: 1920 - protein, 7 aa, synthetic construct
  REGION 1..7: note = n-mer motif
NFSSGDV

SEQ ID NO: 1921 - protein, 7 aa, synthetic construct
  REGION 1..7: note = n-mer motif
SGINATD

SEQ ID NO: 1922 - protein, 7 aa, synthetic construct
  REGION 1..7: note = n-mer motif
RADVSWS

SEQ ID NO: 1923 - protein, 7 aa, synthetic construct
  REGION 1..7: note = n-mer motif
CMDVGKA

SEQ ID NO: 1924 - protein, 7 aa, synthetic construct
  REGION 1..7: note = n-mer motif
GVGATSV

SEQ ID NO: 1925 - protein, 7 aa, synthetic construct
  REGION 1..7: note = n-mer motif
KNNNSDS

SEQ ID NO: 1926 - protein, 7 aa, synthetic construct
  REGION 1..7: note = n-mer motif
NVASIDR

SEQ ID NO: 1927 - protein, 7 aa, synthetic construct
  REGION 1..7: note = n-mer motif
NSVNGLL

SEQ ID NO: 1928 - protein, 7 aa, synthetic construct
  REGION 1..7: note = n-mer motif
TLDRNQT

SEQ ID NO: 1929 - protein, 7 aa, synthetic construct
  REGION 1..7: note = n-mer motif
DQNFERR

SEQ ID NO: 1930 - protein, 7 aa, synthetic construct
  REGION 1..7: note = n-mer motif
VGDRNLV

SEQ ID NO: 1931 - protein, 7 aa, synthetic construct
  REGION 1..7: note = n-mer motif
LEVNLQT

SEQ ID NO: 1932 - protein, 7 aa, synthetic construct
  REGION 1..7: note = n-mer motif
TNGGSLN

SEQ ID NO: 1933 - protein, 7 aa, synthetic construct
  REGION 1..7: note = n-mer motif
FTRTPVT

SEQ ID NO: 1934 - protein, 7 aa, synthetic construct
  REGION 1..7: note = n-mer motif
TPAESKV

SEQ ID NO: 1935 - protein, 7 aa, synthetic construct
  REGION 1..7: note = n-mer motif
FPSHNGA

SEQ ID NO: 1936 - protein, 7 aa, synthetic construct
  REGION 1..7: note = n-mer motif
ARNVMLG

SEQ ID NO: 1937 - protein, 7 aa, synthetic construct
  REGION 1..7: note = n-mer motif
TIQDHIK

SEQ ID NO: 1938 - protein, 7 aa, synthetic construct
  REGION 1..7: note = n-mer motif
INSYLHE

SEQ ID NO: 1939 - protein, 7 aa, synthetic construct
  REGION 1..7: note = n-mer motif
AHDVTVN

SEQ ID NO: 1940 - protein, 7 aa, synthetic construct
  REGION 1..7: note = n-mer motif
TVGVQQT

SEQ ID NO: 1941 - protein, 7 aa, synthetic construct
  REGION 1..7: note = n-mer motif
TGSSDRL

SEQ ID NO: 1942 - protein, 7 aa, synthetic construct
  REGION 1..7: note = n-mer motif
NHDTAHA

SEQ ID NO: 1943 - protein, 7 aa, synthetic construct
  REGION 1..7: note = n-mer motif
AESQLAS

SEQ ID NO: 1944 - protein, 7 aa, synthetic construct
  REGION 1..7: note = n-mer motif
GNAYNTT

SEQ ID NO: 1945 - protein, 7 aa, synthetic construct
  REGION 1..7: note = n-mer motif
NHQAGTT

SEQ ID NO: 1946 - protein, 7 aa, synthetic construct
  REGION 1..7: note = n-mer motif
TVGENHR

SEQ ID NO: 1947 - protein, 7 aa, synthetic construct
  REGION 1..7: note = n-mer motif
LTTKIPL

SEQ ID NO: 1948 - protein, 7 aa, synthetic construct
  REGION 1..7: note = n-mer motif
TNYPEAN

SEQ ID NO: 1949 - protein, 7 aa, synthetic construct
  REGION 1..7: note = n-mer motif
NTAPPNH

SEQ ID NO: 1950 - protein, 7 aa, synthetic construct
  REGION 1..7: note = n-mer motif
VLSTGLR

SEQ ID NO: 1951 - protein, 7 aa, synthetic construct
  REGION 1..7: note = n-mer motif
LTSHSAG

SEQ ID NO: 1952 - protein, 7 aa, synthetic construct
  REGION 1..7: note = n-mer motif
MNKHGVL

SEQ ID NO: 1953 - protein, 7 aa, synthetic construct
  REGION 1..7: note = n-mer motif
DLTRAAI

SEQ ID NO: 1954 - protein, 7 aa, synthetic construct
  REGION 1..7: note = n-mer motif
YIVDHAN

SEQ ID NO: 1955 - protein, 7 aa, synthetic construct
  REGION 1..7: note = n-mer motif
SGPENTL

SEQ ID NO: 1956 - protein, 7 aa, synthetic construct
  REGION 1..7: note = n-mer motif
RYGDTGM

SEQ ID NO: 1957 - protein, 7 aa, synthetic construct
  REGION 1..7: note = n-mer motif
DGKNSYA

SEQ ID NO: 1958 - protein, 7 aa, synthetic construct
  REGION 1..7: note = n-mer motif
EAHNRVI

SEQ ID NO: 1959 - protein, 7 aa, synthetic construct
  REGION 1..7: note = n-mer motif
SLQAGRM

SEQ ID NO: 1960 - protein, 7 aa, synthetic construct
  REGION 1..7: note = n-mer motif
DAKALTT

SEQ ID NO: 1961 - protein, 7 aa, synthetic construct
  REGION 1..7: note = n-mer motif
TDTRKND

SEQ ID NO: 1962 - protein, 7 aa, synthetic construct
  REGION 1..7: note = n-mer motif
DSSHYST

SEQ ID NO: 1963 - protein, 7 aa, synthetic construct
  REGION 1..7: note = n-mer motif
TMHLPNL

SEQ ID NO: 1964 - protein, 7 aa, synthetic construct
  REGION 1..7: note = n-mer motif
RDGSTKV

SEQ ID NO: 1965 - protein, 7 aa, synthetic construct
  REGION 1..7: note = n-mer motif
SGYQMTE

SEQ ID NO: 1966 - protein, 7 aa, synthetic construct
  REGION 1..7: note = n-mer motif
CDLSQSC

SEQ ID NO: 1967 - protein, 7 aa, synthetic construct
  REGION 1..7: note = n-mer motif
RNASNGV

SEQ ID NO: 1968 - protein, 7 aa, synthetic construct
  REGION 1..7: note = n-mer motif
QSQNVTQ

SEQ ID NO: 1969 - protein, 7 aa, synthetic construct
  REGION 1..7: note = n-mer motif
DSAPSTI

SEQ ID NO: 1970 - protein, 7 aa, synthetic construct
  REGION 1..7: note = n-mer motif
RSVPSPH

SEQ ID NO: 1971 - protein, 7 aa, synthetic construct
  REGION 1..7: note = n-mer motif
MTSASRG

SEQ ID NO: 1972 - protein, 7 aa, synthetic construct
  REGION 1..7: note = n-mer motif
ALASRPM

SEQ ID NO: 1973 - protein, 7 aa, synthetic construct
  REGION 1..7: note = n-mer motif
LNLSNDW

SEQ ID NO: 1974 - protein, 7 aa, synthetic construct
  REGION 1..7: note = n-mer motif
VSTAQRQ

SEQ ID NO: 1975 - protein, 7 aa, synthetic construct
  REGION 1..7: note = n-mer motif
HADVGMS

SEQ ID NO: 1976 - protein, 7 aa, synthetic construct
  REGION 1..7: note = n-mer motif
AGGLLSR

SEQ ID NO: 1977 - protein, 7 aa, synthetic construct
  REGION 1..7: note = n-mer motif
HLSQANH

SEQ ID NO: 1978 - protein, 7 aa, synthetic construct
  REGION 1..7: note = n-mer motif
VHNPTTT

SEQ ID NO: 1979 - protein, 7 aa, synthetic construct
  REGION 1..7: note = n-mer motif
SQRNPDD

SEQ ID NO: 1980 - protein, 7 aa, synthetic construct
  REGION 1..7: note = n-mer motif
RETNNFA

SEQ ID NO: 1981 - protein, 7 aa, synthetic construct
  REGION 1..7: note = n-mer motif
NAGALMG

SEQ ID NO: 1982 - protein, 7 aa, synthetic construct
  REGION 1..7: note = n-mer motif
LPKTVNM

SEQ ID NO: 1983 - protein, 7 aa, synthetic construct
  REGION 1..7: note = n-mer motif
ASDLQMT

SEQ ID NO: 1984 - protein, 7 aa, synthetic construct
  REGION 1..7: note = n-mer motif
QALATTN

SEQ ID NO: 1985 - protein, 7 aa, synthetic construct
  REGION 1..7: note = n-mer motif
HESSGYH

SEQ ID NO: 1986 - protein, 7 aa, synthetic construct
  REGION 1..7: note = n-mer motif
GVNDRAR

SEQ ID NO: 1987 - protein, 7 aa, synthetic construct
  REGION 1..7: note = n-mer motif
PRDALRT

SEQ ID NO: 1988 - protein, 7 aa, synthetic construct
  REGION 1..7: note = n-mer motif
NDSSSMS

SEQ ID NO: 1989 - protein, 7 aa, synthetic construct
  REGION 1..7: note = n-mer motif
EYNTRHD

SEQ ID NO: 1990 - protein, 7 aa, synthetic construct
  REGION 1..7: note = n-mer motif
ASPAHTS

SEQ ID NO: 1991 - protein, 7 aa, synthetic construct
  REGION 1..7: note = n-mer motif
QNSNTPS

SEQ ID NO: 1992 - protein, 7 aa, synthetic construct
  REGION 1..7: note = n-mer motif
LAKLGNY

SEQ ID NO: 1993 - protein, 7 aa, synthetic construct
  REGION 1..7: note = n-mer motif
ASDRQSG

SEQ ID NO: 1994 - protein, 7 aa, synthetic construct
  REGION 1..7: note = n-mer motif
YQNGVLP

SEQ ID NO: 1995 - protein, 7 aa, synthetic construct
  REGION 1..7: note = n-mer motif
NKFGYNP

SEQ ID NO: 1996 - protein, 7 aa, synthetic construct
  REGION 1..7: note = n-mer motif
KKTNGIP

SEQ ID NO: 1997 - protein, 7 aa, synthetic construct
  REGION 1..7: note = n-mer motif
VNDNRGN

SEQ ID NO: 1998 - protein, 7 aa, synthetic construct
  REGION 1..7: note = n-mer motif
MHTITGS

SEQ ID NO: 1999 - protein, 7 aa, synthetic construct
  REGION 1..7: note = n-mer motif
IDGVQKL

SEQ ID NO: 2000 - protein, 7 aa, synthetic construct
  REGION 1..7: note = n-mer motif
AQVNNHD

SEQ ID NO: 2001 - protein, 7 aa, synthetic construct
  REGION 1..7: note = n-mer motif
VSSPNGT

SEQ ID NO: 2002 - protein, 7 aa, synthetic construct
  REGION 1..7: note = n-mer motif
DSAPRAI

SEQ ID NO: 2003 - protein, 7 aa, synthetic construct
  REGION 1..7: note = n-mer motif
SASDSQH

SEQ ID NO: 2004 - protein, 7 aa, synthetic construct
  REGION 1..7: note = n-mer motif
SAHQTPT

SEQ ID NO: 2005 - protein, 7 aa, synthetic construct
  REGION 1..7: note = n-mer motif
ATLNNSY

SEQ ID NO: 2006 - protein, 7 aa, synthetic construct
  REGION 1..7: note = n-mer motif
EDSMRFS

SEQ ID NO: 2007 - protein, 7 aa, synthetic construct
  REGION 1..7: note = n-mer motif
ERNGLIE

SEQ ID NO: 2008 - protein, 7 aa, synthetic construct
  REGION 1..7: note = n-mer motif
LVLDSRN

SEQ ID NO: 2009 - protein, 7 aa, synthetic construct
  REGION 1..7: note = n-mer motif
TVEQINS

SEQ ID NO: 2010 - protein, 7 aa, synthetic construct
  REGION 1..7: note = n-mer motif
GTGTVGW

SEQ ID NO: 2011 - protein, 7 aa, synthetic construct
  REGION 1..7: note = n-mer motif
NQQRIDN

SEQ ID NO: 2012 - protein, 7 aa, synthetic construct
  REGION 1..7: note = n-mer motif
IQNGVLP

SEQ ID NO: 2013 - protein, 7 aa, synthetic construct
  REGION 1..7: note = n-mer motif
GDISSRN

SEQ ID NO: 2014 - protein, 7 aa, synthetic construct
  REGION 1..7: note = n-mer motif
VTGTTPG

SEQ ID NO: 2015 - protein, 7 aa, synthetic construct
  REGION 1..7: note = n-mer motif
TRESMSI

SEQ ID NO: 2016 - protein, 7 aa, synthetic construct
  REGION 1..7: note = n-mer motif
HTYSQAD

SEQ ID NO: 2017 - protein, 7 aa, synthetic construct
  REGION 1..7: note = n-mer motif
SNMGVAS

SEQ ID NO: 2018 - protein, 7 aa, synthetic construct
  REGION 1..7: note = n-mer motif
HDLNHGK

SEQ ID NO: 2019 - protein, 7 aa, synthetic construct
  REGION 1..7: note = n-mer motif
LYGGAHQ

SEQ ID NO: 2020 - protein, 7 aa, synthetic construct
  REGION 1..7: note = n-mer motif
NVYGDGI

SEQ ID NO: 2021 - protein, 7 aa, synthetic construct
  REGION 1..7: note = n-mer motif
STINMRA

SEQ ID NO: 2022 - protein, 7 aa, synthetic construct
  REGION 1..7: note = n-mer motif
KMGSIEV

SEQ ID NO: 2023 - protein, 7 aa, synthetic construct
  REGION 1..7: note = n-mer motif
SETRAGY

SEQ ID NO: 2024 - protein, 7 aa, synthetic construct
  REGION 1..7: note = n-mer motif
NVGNTLG

SEQ ID NO: 2025 - protein, 7 aa, synthetic construct
  REGION 1..7: note = n-mer motif
IGGTDTR

SEQ ID NO: 2026 - protein, 7 aa, synthetic construct
  REGION 1..7: note = n-mer motif
ADKGFGH

SEQ ID NO: 2027 - protein, 7 aa, synthetic construct
  REGION 1..7: note = n-mer motif
WQDHNKV

SEQ ID NO: 2028 - protein, 7 aa, synthetic construct
  REGION 1..7: note = n-mer motif
NYGSGRI

SEQ ID NO: 2029 - protein, 7 aa, synthetic construct
  REGION 1..7: note = n-mer motif
THKQVDL

SEQ ID NO: 2030 - protein, 7 aa, synthetic construct
  REGION 1..7: note = n-mer motif
RQNDKGN

SEQ ID NO: 2031 - protein, 7 aa, synthetic construct
  REGION 1..7: note = n-mer motif
GRNESPE

SEQ ID NO: 2032 - protein, 7 aa, synthetic construct
  REGION 1..7: note = n-mer motif
VFTGQTE

SEQ ID NO: 2033 - protein, 7 aa, synthetic construct
  REGION 1..7: note = n-mer motif
YVDRKDN

SEQ ID NO: 2034 - protein, 7 aa, synthetic construct
  REGION 1..7: note = n-mer motif
NNTLNIL

SEQ ID NO: 2035 - protein, 7 aa, synthetic construct
  REGION 1..7: note = n-mer motif
LSYSIQH

SEQ ID NO: 2036 - protein, 7 aa, synthetic construct
  REGION 1..7: note = n-mer motif
ATNRSPL

SEQ ID NO: 2037 - protein, 7 aa, synthetic construct
  REGION 1..7: note = n-mer motif
VHTADTI

SEQ ID NO: 2038 - protein, 7 aa, synthetic construct
  REGION 1..7: note = n-mer motif
GHLVNMS

SEQ ID NO: 2039 - protein, 7 aa, synthetic construct
  REGION 1..7: note = n-mer motif
LDYTPQN

SEQ ID NO: 2040 - protein, 7 aa, synthetic construct
  REGION 1..7: note = n-mer motif
SASYSRM

SEQ ID NO: 2041 - protein, 7 aa, synthetic construct
  REGION 1..7: note = n-mer motif
SGAAQNP

SEQ ID NO: 2042 - protein, 7 aa, synthetic construct
  REGION 1..7: note = n-mer motif
RNTLADL

SEQ ID NO: 2043 - protein, 7 aa, synthetic construct
  REGION 1..7: note = n-mer motif
GSTVSAQ

SEQ ID NO: 2044 - protein, 7 aa, synthetic construct
  REGION 1..7: note = n-mer motif
SKDSTMY

SEQ ID NO: 2045 - protein, 7 aa, synthetic construct
  REGION 1..7: note = n-mer motif
VVVHTIP

SEQ ID NO: 2046 - protein, 7 aa, synthetic construct
  REGION 1..7: note = n-mer motif
PRTVSLD

SEQ ID NO: 2047 - protein, 7 aa, synthetic construct
  REGION 1..7: note = n-mer motif
MMKSEEN

SEQ ID NO: 2048 - protein, 7 aa, synthetic construct
  REGION 1..7: note = n-mer motif
TTDRPNG

SEQ ID NO: 2049 - protein, 7 aa, synthetic construct
  REGION 1..7: note = n-mer motif
HSPPTTM

SEQ ID NO: 2050 - protein, 7 aa, synthetic construct
  REGION 1..7: note = n-mer motif
GQWTTGT

SEQ ID NO: 2051 - protein, 7 aa, synthetic construct
  REGION 1..7: note = n-mer motif
DGMNGVG

SEQ ID NO: 2052 - protein, 7 aa, synthetic construct
  REGION 1..7: note = n-mer motif
LHTVANE

SEQ ID NO: 2053 - protein, 7 aa, synthetic construct
  REGION 1..7: note = n-mer motif
YTSQTST

SEQ ID NO: 2054 - protein, 7 aa, synthetic construct
  REGION 1..7: note = n-mer motif
NFSEMST

SEQ ID NO: 2055 - protein, 7 aa, synthetic construct
  REGION 1..7: note = n-mer motif
INIRSDL

SEQ ID NO: 2056 - protein, 7 aa, synthetic construct
  REGION 1..7: note = n-mer motif
PSNSERF

SEQ ID NO: 2057 - protein, 7 aa, synthetic construct
  REGION 1..7: note = n-mer motif
YTNYGDL

SEQ ID NO: 2058 - protein, 7 aa, synthetic construct
  REGION 1..7: note = n-mer motif
DKSTAQA

SEQ ID NO: 2059 - protein, 7 aa, synthetic construct
  REGION 1..7: note = n-mer motif
HTDMVSS

SEQ ID NO: 2060 - protein, 7 aa, synthetic construct
  REGION 1..7: note = n-mer motif
NKSLSMD

SEQ ID NO: 2061 - protein, 7 aa, synthetic construct
  REGION 1..7: note = n-mer motif
GHYATNT

SEQ ID NO: 2062 - protein, 7 aa, synthetic construct
  REGION 1..7: note = n-mer motif
VIVSTKS

SEQ ID NO: 2063 - protein, 7 aa, synthetic construct
  REGION 1..7: note = n-mer motif
THSLMND

SEQ ID NO: 2064 - protein, 7 aa, synthetic construct
  REGION 1..7: note = n-mer motif
NYHGDNV

SEQ ID NO: 2065 - protein, 7 aa, synthetic construct
  REGION 1..7: note = n-mer motif
RDDQQLD

SEQ ID NO: 2066 - protein, 7 aa, synthetic construct
  REGION 1..7: note = n-mer motif
DDKTGRY

SEQ ID NO: 2067 - protein, 7 aa, synthetic construct
  REGION 1..7: note = n-mer motif
GSSQHHE

SEQ ID NO: 2068 - protein, 7 aa, synthetic construct
  REGION 1..7: note = n-mer motif
RVTGVST

SEQ ID NO: 2069 - protein, 7 aa, synthetic construct
  REGION 1..7: note = n-mer motif
STASGHT

SEQ ID NO: 2070 - protein, 7 aa, synthetic construct
  REGION 1..7: note = n-mer motif
TNNLSYE

SEQ ID NO: 2071 - protein, 7 aa, synthetic construct
  REGION 1..7: note = n-mer motif
QHNSASA

SEQ ID NO: 2072 - protein, 7 aa, synthetic construct
  REGION 1..7: note = n-mer motif
PAKGFGH

SEQ ID NO: 2073 - protein, 7 aa, synthetic construct
  REGION 1..7: note = n-mer motif
WYETISP

SEQ ID NO: 2074 - protein, 7 aa, synthetic construct
  REGION 1..7: note = n-mer motif
TDATGRH

SEQ ID NO: 2075 - protein, 7 aa, synthetic construct
  REGION 1..7: note = n-mer motif
IQAKNSE

SEQ ID NO: 2076 - protein, 7 aa, synthetic construct
  REGION 1..7: note = n-mer motif
STETRGG

SEQ ID NO: 2077 - protein, 7 aa, synthetic construct
  REGION 1..7: note = n-mer motif
FSTNSVI

SEQ ID NO: 2078 - protein, 7 aa, synthetic construct
  REGION 1..7: note = n-mer motif
SNLRNTI

SEQ ID NO: 2079 - protein, 7 aa, synthetic construct
  REGION 1..7: note = n-mer motif
GMIGHNA

SEQ ID NO: 2080 - protein, 7 aa, synthetic construct
  REGION 1..7: note = n-mer motif
SGQGFSA

SEQ ID NO: 2081 - protein, 7 aa, synthetic construct
  REGION 1..7: note = n-mer motif
THNSTGL

SEQ ID NO: 2082 - protein, 7 aa, synthetic construct
  REGION 1..7: note = n-mer motif
RIDSAMV

SEQ ID NO: 2083 - protein, 7 aa, synthetic construct
  REGION 1..7: note = n-mer motif
VAMGGGP

SEQ ID NO: 2084 - protein, 7 aa, synthetic construct
  REGION 1..7: note = n-mer motif
GSHNGPA

SEQ ID NO: 2085 - protein, 7 aa, synthetic construct
  REGION 1..7: note = n-mer motif
HSAAGDG

SEQ ID NO: 2086 - protein, 7 aa, synthetic construct
  REGION 1..7: note = n-mer motif
AQGITHA

SEQ ID NO: 2087 - protein, 7 aa, synthetic construct
  REGION 1..7: note = n-mer motif
SALLRMD

SEQ ID NO: 2088 - protein, 7 aa, synthetic construct
  REGION 1..7: note = n-mer motif
WQMGAGS

SEQ ID NO: 2089 - protein, 7 aa, synthetic construct
  REGION 1..7: note = n-mer motif
IDSHASI

SEQ ID NO: 2090 - protein, 7 aa, synthetic construct
  REGION 1..7: note = n-mer motif
SLDHAPL

SEQ ID NO: 2091 - protein, 7 aa, synthetic construct
  REGION 1..7: note = n-mer motif
ENNMQHG

SEQ ID NO: 2092 - protein, 7 aa, synthetic construct
  REGION 1..7: note = n-mer motif
KGAQGVQ

SEQ ID NO: 2093 - protein, 7 aa, synthetic construct
  REGION 1..7: note = n-mer motif
VAVSNTP

SEQ ID NO: 2094 - protein, 7 aa, synthetic construct
  REGION 1..7: note = n-mer motif
VESSYSR

SEQ ID NO: 2095 - protein, 7 aa, synthetic construct
  REGION 1..7: note = n-mer motif
HNTESKT

SEQ ID NO: 2096 - protein, 7 aa, synthetic construct
  REGION 1..7: note = n-mer motif
NESTKES

SEQ ID NO: 2097 - protein, 7 aa, synthetic construct
  REGION 1..7: note = n-mer motif
DVYLKSP

SEQ ID NO: 2098 - protein, 7 aa, synthetic construct
  REGION 1..7: note = n-mer motif
QSGARTL

SEQ ID NO: 2099 - protein, 7 aa, synthetic construct
  REGION 1..7: note = n-mer motif
SNSQVHN

SEQ ID NO: 2100 - protein, 7 aa, synthetic construct
  REGION 1..7: note = n-mer motif
VVSSGGW

SEQ ID NO: 2101 - protein, 7 aa, synthetic construct
  REGION 1..7: note = n-mer motif
PSSFNSA

SEQ ID NO: 2102 - protein, 7 aa, synthetic construct
  REGION 1..7: note = n-mer motif
KQTDSRG

SEQ ID NO: 2103 - protein, 7 aa, synthetic construct
  REGION 1..7: note = n-mer motif
NTTPPNH

SEQ ID NO: 2104 - protein, 7 aa, synthetic construct
  REGION 1..7: note = n-mer motif
QNGTSSI

SEQ ID NO: 2105 - protein, 7 aa, synthetic construct
  REGION 1..7: note = n-mer motif
LMKDMES

SEQ ID NO: 2106 - protein, 7 aa, synthetic construct
  REGION 1..7: note = n-mer motif
TQTGHVS

SEQ ID NO: 2107 - protein, 7 aa, synthetic construct
  REGION 1..7: note = n-mer motif
EIHTTTG

SEQ ID NO: 2108 - protein, 7 aa, synthetic construct
  REGION 1..7: note = n-mer motif
IQTTTKC

SEQ ID NO: 2109 - protein, 7 aa, synthetic construct
  REGION 1..7: note = n-mer motif
PAEGNNR

SEQ ID NO: 2110 - protein, 7 aa, synthetic construct
  REGION 1..7: note = n-mer motif
YIAGGEQ

SEQ ID NO: 2111 - protein, 7 aa, synthetic construct
  REGION 1..7: note = n-mer motif
EVRDQKT

SEQ ID NO: 2112 - protein, 7 aa, synthetic construct
  REGION 1..7: note = n-mer motif
YAVAIGT

SEQ ID NO: 2113 - protein, 7 aa, synthetic construct
  REGION 1..7: note = n-mer motif
SANEHNH

SEQ ID NO: 2114 - protein, 7 aa, synthetic construct
  REGION 1..7: note = n-mer motif
GMRDTPP

SEQ ID NO: 2115 - protein, 7 aa, synthetic construct
  REGION 1..7: note = n-mer motif
AQQIVNG

SEQ ID NO: 2116 - protein, 7 aa, synthetic construct
  REGION 1..7: note = n-mer motif
SSSQTVL

SEQ ID NO: 2117 - protein, 7 aa, synthetic construct
  REGION 1..7: note = n-mer motif
VIQSDNT

SEQ ID NO: 2118 - protein, 7 aa, synthetic construct
  REGION 1..7: note = n-mer motif
VPAHSRG

SEQ ID NO: 2119 - protein, 7 aa, synthetic construct
  REGION 1..7: note = n-mer motif
SNTGSLG

SEQ ID NO: 2120 - protein, 7 aa, synthetic construct
  REGION 1..7: note = n-mer motif
WAKDVNV

SEQ ID NO: 2121 - protein, 7 aa, synthetic construct
  REGION 1..7: note = n-mer motif
NVLGASS

SEQ ID NO: 2122 - protein, 7 aa, synthetic construct
  REGION 1..7: note = n-mer motif
TPEASAR

SEQ ID NO: 2123 - protein, 7 aa, synthetic construct
  REGION 1..7: note = n-mer motif
NYNGVNV

SEQ ID NO: 2124 - protein, 7 aa, synthetic construct
  REGION 1..7: note = n-mer motif
NTTGSSG

SEQ ID NO: 2125 - protein, 7 aa, synthetic construct
  REGION 1..7: note = n-mer motif
SSGQPLV

SEQ ID NO: 2126 - protein, 7 aa, synthetic construct
  REGION 1..7: note = n-mer motif
QAGGVAS

SEQ ID NO: 2127 - protein, 7 aa, synthetic construct
  REGION 1..7: note = n-mer motif
PLQSQSG

SEQ ID NO: 2128 - protein, 7 aa, synthetic construct
  REGION 1..7: note = n-mer motif
QRTSEAP

SEQ ID NO: 2129 - protein, 7 aa, synthetic construct
  REGION 1..7: note = n-mer motif
LAKTVAI

SEQ ID NO: 2130 - protein, 7 aa, synthetic construct
  REGION 1..7: note = n-mer motif
THTLGGT

SEQ ID NO: 2131 - protein, 7 aa, synthetic construct
  REGION 1..7: note = n-mer motif
HDYSMNA

SEQ ID NO: 2132 - protein, 7 aa, synthetic construct
  REGION 1..7: note = n-mer motif
GKPAEAP

SEQ ID NO: 2133 - protein, 7 aa, synthetic construct
  REGION 1..7: note = n-mer motif
RNENVNA

SEQ ID NO: 2134 - protein, 7 aa, synthetic construct
  REGION 1..7: note = n-mer motif
SSREAKF

SEQ ID NO: 2135 - protein, 7 aa, synthetic construct
  REGION 1..7: note = n-mer motif
SSSDSPR

SEQ ID NO: 2136 - protein, 7 aa, synthetic construct
  REGION 1..7: note = n-mer motif
MNTTYNE

SEQ ID NO: 2137 - protein, 7 aa, synthetic construct
  REGION 1..7: note = n-mer motif
VRSGIKP

SEQ ID NO: 2138 - protein, 7 aa, synthetic construct
  REGION 1..7: note = n-mer motif
QENPMKM

SEQ ID NO: 2139 - protein, 7 aa, synthetic construct
  REGION 1..7: note = n-mer motif
TEPLPMS

SEQ ID NO: 2140 - protein, 7 aa, synthetic construct
  REGION 1..7: note = n-mer motif
RHGDTPM

SEQ ID NO: 2141 - protein, 7 aa, synthetic construct
  REGION 1..7: note = n-mer motif
AVNTYNS

SEQ ID NO: 2142 - protein, 7 aa, synthetic construct
  REGION 1..7: note = n-mer motif
ASTESHV

SEQ ID NO: 2143 - protein, 7 aa, synthetic construct
  REGION 1..7: note = n-mer motif
TNLSQSA

SEQ ID NO: 2144 - protein, 7 aa, synthetic construct
  REGION 1..7: note = n-mer motif
ELSTPMV

SEQ ID NO: 2145 - protein, 7 aa, synthetic construct
  REGION 1..7: note = n-mer motif
YAHPVTH

SEQ ID NO: 2146 - protein, 7 aa, synthetic construct
  REGION 1..7: note = n-mer motif
RGSTGTQ

SEQ ID NO: 2147 - protein, 7 aa, synthetic construct
  REGION 1..7: note = n-mer motif
CVGSCGV

SEQ ID NO: 2148 - protein, 7 aa, synthetic construct
  REGION 1..7: note = n-mer motif
SVAKDQT

SEQ ID NO: 2149 - protein, 7 aa, synthetic construct
  REGION 1..7: note = n-mer motif
TNLSPKT

SEQ ID NO: 2150 - protein, 7 aa, synthetic construct
  REGION 1..7: note = n-mer motif
LGFTPQP

SEQ ID NO: 2151 - protein, 7 aa, synthetic construct
  REGION 1..7: note = n-mer motif
NISSINQ

SEQ ID NO: 2152 - protein, 7 aa, synthetic construct
  REGION 1..7: note = n-mer motif
VYDNVSS

SEQ ID NO: 2153 - protein, 7 aa, synthetic construct
  REGION 1..7: note = n-mer motif
SGKQDKY

SEQ ID NO: 2154 - protein, 7 aa, synthetic construct
  REGION 1..7: note = n-mer motif
RLTELVI

SEQ ID NO: 2155 - protein, 7 aa, synthetic construct
  REGION 1..7: note = n-mer motif
HKSESHN

SEQ ID NO: 2156 - protein, 7 aa, synthetic construct
  REGION 1..7: note = n-mer motif
EATHGSY

SEQ ID NO: 2157 - protein, 7 aa, synthetic construct
  REGION 1..7: note = n-mer motif
NLLVDQR

SEQ ID NO: 2158 - protein, 7 aa, synthetic construct
  REGION 1..7: note = n-mer motif
NINDTKN

SEQ ID NO: 2159 - protein, 7 aa, synthetic construct
  REGION 1..7: note = n-mer motif
LAVTNVR

SEQ ID NO: 2160 - protein, 7 aa, synthetic construct
  REGION 1..7: note = n-mer motif
PSTLAET

SEQ ID NO: 2161 - protein, 7 aa, synthetic construct
  REGION 1..7: note = n-mer motif
PKPGTGE

SEQ ID NO: 2162 - protein, 7 aa, synthetic construct
  REGION 1..7: note = n-mer motif
VLLQNSH

SEQ ID NO: 2163 - protein, 7 aa, synthetic construct
  REGION 1..7: note = n-mer motif
YGNANTV

SEQ ID NO: 2164 - protein, 7 aa, synthetic construct
  REGION 1..7: note = n-mer motif
TSGVLTR

SEQ ID NO: 2165 - protein, 7 aa, synthetic construct
  REGION 1..7: note = n-mer motif
KITETNL

SEQ ID NO: 2166 - protein, 7 aa, synthetic construct
  REGION 1..7: note = n-mer motif
VRRDETP

SEQ ID NO: 2167 - protein, 7 aa, synthetic construct
  REGION 1..7: note = n-mer motif
SKMSNPV

SEQ ID NO: 2168 - protein, 7 aa, synthetic construct
  REGION 1..7: note = n-mer motif
WESLSNA

SEQ ID NO: 2169 - protein, 7 aa, synthetic construct
  REGION 1..7: note = n-mer motif
ANGGGYP

SEQ ID NO: 2170 - protein, 7 aa, synthetic construct
  REGION 1..7: note = n-mer motif
MLASRVP

SEQ ID NO: 2171 - protein, 7 aa, synthetic construct
  REGION 1..7: note = n-mer motif
CGLNCGK

SEQ ID NO: 2172 - protein, 7 aa, synthetic construct
  REGION 1..7: note = n-mer motif
TITSPSV

SEQ ID NO: 2173 - protein, 7 aa, synthetic construct
  REGION 1..7: note = n-mer motif
WSNAQSP

SEQ ID NO: 2174 - protein, 7 aa, synthetic construct
  REGION 1..7: note = n-mer motif
TESPKLL

SEQ ID NO: 2175 - protein, 7 aa, synthetic construct
  REGION 1..7: note = n-mer motif
HLVTSGI

SEQ ID NO: 2176 - protein, 7 aa, synthetic construct
  REGION 1..7: note = n-mer motif
PPKSDSN

SEQ ID NO: 2177 - protein, 7 aa, synthetic construct
  REGION 1..7: note = n-mer motif
IAVHVLS

SEQ ID NO: 2178 - protein, 7 aa, synthetic construct
  REGION 1..7: note = n-mer motif
TGTATLP

SEQ ID NO: 2179 - protein, 7 aa, synthetic construct
  REGION 1..7: note = n-mer motif
NTTPPNH

SEQ ID NO: 2180 - protein, 7 aa, synthetic construct
  REGION 1..7: note = n-mer motif
CTATKCS

SEQ ID NO: 2181 - protein, 7 aa, synthetic construct
  REGION 1..7: note = n-mer motif
HSDMVSG

SEQ ID NO: 2182 - protein, 7 aa, synthetic construct
  REGION 1..7: note = n-mer motif
PNAHHLP

SEQ ID NO: 2183 - protein, 7 aa, synthetic construct
  REGION 1..7: note = n-mer motif
SNNMNQA

SEQ ID NO: 2184 - protein, 7 aa, synthetic construct
  REGION 1..7: note = n-mer motif
SDNNRAN

SEQ ID NO: 2185 - protein, 7 aa, synthetic construct
  REGION 1..7: note = n-mer motif
LQTPGTT

SEQ ID NO: 2186 - protein, 7 aa, synthetic construct
  REGION 1..7: note = n-mer motif
VRGVQDA

SEQ ID NO: 2187 - protein, 7 aa, synthetic construct
  REGION 1..7: note = n-mer motif
SLDSRSS

SEQ ID NO: 2188 - protein, 7 aa, synthetic construct
  REGION 1..7: note = n-mer motif
VCVTTCA

SEQ ID NO: 2189 - protein, 7 aa, synthetic construct
  REGION 1..7: note = n-mer motif
PNTNHLV

SEQ ID NO: 2190 - protein, 7 aa, synthetic construct
  REGION 1..7: note = n-mer motif
LMSGKEN

SEQ ID NO: 2191 - protein, 7 aa, synthetic construct
  REGION 1..7: note = n-mer motif
TSASENW

SEQ ID NO: 2192 - protein, 7 aa, synthetic construct
  REGION 1..7: note = n-mer motif
FLPQLGQ

SEQ ID NO: 2193 - protein, 7 aa, synthetic construct
  REGION 1..7: note = n-mer motif
PFNPGNV

SEQ ID NO: 2194 - protein, 7 aa, synthetic construct
  REGION 1..7: note = n-mer motif
GTPGQSI

SEQ ID NO: 2195 - protein, 7 aa, synthetic construct
  REGION 1..7: note = n-mer motif
YNNGGHV

SEQ ID NO: 2196 - protein, 7 aa, synthetic construct
  REGION 1..7: note = n-mer motif
LGNHYTP

SEQ ID NO: 2197 - protein, 7 aa, synthetic construct
  REGION 1..7: note = n-mer motif
QVNQPRI

SEQ ID NO: 2198 - protein, 7 aa, synthetic construct
  REGION 1..7: note = n-mer motif
LGNNRPL

SEQ ID NO: 2199 - protein, 7 aa, synthetic construct
  REGION 1..7: note = n-mer motif
PPESARG

SEQ ID NO: 2200 - protein, 7 aa, synthetic construct
  REGION 1..7: note = n-mer motif
KSVGDGR

SEQ ID NO: 2201 - protein, 7 aa, synthetic construct
  REGION 1..7: note = n-mer motif
SLRTDEF

SEQ ID NO: 2202 - protein, 7 aa, synthetic construct
  REGION 1..7: note = n-mer motif
STTNVAY

SEQ ID NO: 2203 - protein, 7 aa, synthetic construct
  REGION 1..7: note = n-mer motif
RMSDPSD

SEQ ID NO: 2204 - protein, 7 aa, synthetic construct
  REGION 1..7: note = n-mer motif
SLSITSA

SEQ ID NO: 2205 - protein, 7 aa, synthetic construct
  REGION 1..7: note = n-mer motif
ESATSLK

SEQ ID NO: 2206 - protein, 7 aa, synthetic construct
  REGION 1..7: note = n-mer motif
YTDGRNT

SEQ ID NO: 2207 - protein, 7 aa, synthetic construct
  REGION 1..7: note = n-mer motif
SISNLRT

SEQ ID NO: 2208 - protein, 7 aa, synthetic construct
  REGION 1..7: note = n-mer motif
QNDKSDN

SEQ ID NO: 2209 - protein, 7 aa, synthetic construct
  REGION 1..7: note = n-mer motif
GGTGLSK

SEQ ID NO: 2210 - protein, 7 aa, synthetic construct
  REGION 1..7: note = n-mer motif
SQAQIRV

SEQ ID NO: 2211 - protein, 7 aa, synthetic construct
  REGION 1..7: note = n-mer motif
GLMAHVT

SEQ ID NO: 2212 - protein, 7 aa, synthetic construct
  REGION 1..7: note = n-mer motif
LVVSNSL

SEQ ID NO: 2213 - protein, 7 aa, synthetic construct
  REGION 1..7: note = n-mer motif
HDSVNTA

SEQ ID NO: 2214 - protein, 7 aa, synthetic construct
  REGION 1..7: note = n-mer motif
TLAKDGN

SEQ ID NO: 2215 - protein, 7 aa, synthetic construct
  REGION 1..7: note = n-mer motif
SDGSKLL

SEQ ID NO: 2216 - protein, 7 aa, synthetic construct
  REGION 1..7: note = n-mer motif
IDKTFSV

SEQ ID NO: 2217 - protein, 7 aa, synthetic construct
  REGION 1..7: note = n-mer motif
RLVNIDH

SEQ ID NO: 2218 - protein, 7 aa, synthetic construct
  REGION 1..7: note = n-mer motif
KNYDSDS

SEQ ID NO: 2219 - protein, 7 aa, synthetic construct
  REGION 1..7: note = n-mer motif
STQSTNP

SEQ ID NO: 2220 - protein, 7 aa, synthetic construct
  REGION 1..7: note = n-mer motif
QISLQLG

SEQ ID NO: 2221 - protein, 7 aa, synthetic construct
  REGION 1..7: note = n-mer motif
SEPLRVG

SEQ ID NO: 2222 - protein, 7 aa, synthetic construct
  REGION 1..7: note = n-mer motif
SRLQTQQ

SEQ ID NO: 2223 - protein, 7 aa, synthetic construct
  REGION 1..7: note = n-mer motif
EGSQGNH

SEQ ID NO: 2224 - protein, 7 aa, synthetic construct
  REGION 1..7: note = n-mer motif
RSDLTES

SEQ ID NO: 2225 - protein, 7 aa, synthetic construct
  REGION 1..7: note = n-mer motif
HTGVQTN

SEQ ID NO: 2226 - protein, 7 aa, synthetic construct
  REGION 1..7: note = n-mer motif
ELDHLSH

SEQ ID NO: 2227 - protein, 7 aa, synthetic construct
  REGION 1..7: note = n-mer motif
VTGVDYA

SEQ ID NO: 2228 - protein, 7 aa, synthetic construct
  REGION 1..7: note = n-mer motif
GGAHTRV

SEQ ID NO: 2229 - protein, 7 aa, synthetic construct
  REGION 1..7: note = n-mer motif
AYGIHEV

SEQ ID NO: 2230 - protein, 7 aa, synthetic construct
  REGION 1..7: note = n-mer motif
AMLRMEQ

SEQ ID NO: 2231 - protein, 7 aa, synthetic construct
  REGION 1..7: note = n-mer motif
RQANQTY

SEQ ID NO: 2232 - protein, 7 aa, synthetic construct
  REGION 1..7: note = n-mer motif
FSGQALA

SEQ ID NO: 2233 - protein, 7 aa, synthetic construct
  REGION 1..7: note = n-mer motif
DNVNSQP

SEQ ID NO: 2234 - protein, 7 aa, synthetic construct
  REGION 1..7: note = n-mer motif
GLHGTSN

SEQ ID NO: 2235 - protein, 7 aa, synthetic construct
  REGION 1..7: note = n-mer motif
EREPPKN

SEQ ID NO: 2236 - protein, 7 aa, synthetic construct
  REGION 1..7: note = n-mer motif
VVTLGML

SEQ ID NO: 2237 - protein, 7 aa, synthetic construct
  REGION 1..7: note = n-mer motif
HNNNLLN

SEQ ID NO: 2238 - protein, 7 aa, synthetic construct
  REGION 1..7: note = n-mer motif
LINMSQN

SEQ ID NO: 2239 - protein, 7 aa, synthetic construct
  REGION 1..7: note = n-mer motif
NTNASYS

SEQ ID NO: 2240 - protein, 7 aa, synthetic construct
  REGION 1..7: note = n-mer motif
RLNAGEH

SEQ ID NO: 2241 - protein, 7 aa, synthetic construct
  REGION 1..7: note = n-mer motif
AVILNPV

SEQ ID NO: 2242 - protein, 7 aa, synthetic construct
  REGION 1..7: note = n-mer motif
PSTHGYV

SEQ ID NO: 2243 - protein, 7 aa, synthetic construct
  REGION 1..7: note = n-mer motif
LRASVSE

SEQ ID NO: 2244 - protein, 7 aa, synthetic construct
  REGION 1..7: note = n-mer motif
MMTSMTL

SEQ ID NO: 2245 - protein, 7 aa, synthetic construct
  REGION 1..7: note = n-mer motif
SAHNIVY

SEQ ID NO: 2246 - protein, 7 aa, synthetic construct
  REGION 1..7: note = n-mer motif
HDSTTRP

SEQ ID NO: 2247 - protein, 7 aa, synthetic construct
  REGION 1..7: note = n-mer motif
IKDSYLT

SEQ ID NO: 2248 - protein, 7 aa, synthetic construct
  REGION 1..7: note = n-mer motif
YTPGLTE

SEQ ID NO: 2249 - protein, 7 aa, synthetic construct
  REGION 1..7: note = n-mer motif
KMGGSQS

SEQ ID NO: 2250 - protein, 7 aa, synthetic construct
  REGION 1..7: note = n-mer motif
SRQTALT

SEQ ID NO: 2251 - protein, 7 aa, synthetic construct
  REGION 1..7: note = n-mer motif
VETSRLY

SEQ ID NO: 2252 - protein, 7 aa, synthetic construct
  REGION 1..7: note = n-mer motif
KSNNGEY

SEQ ID NO: 2253 - protein, 7 aa, synthetic construct
  REGION 1..7: note = n-mer motif
SGVHSAR

SEQ ID NO: 2254 - protein, 7 aa, synthetic construct
  REGION 1..7: note = n-mer motif
PNNEKNP

SEQ ID NO: 2255 - protein, 7 aa, synthetic construct
  REGION 1..7: note = n-mer motif
TIGEGYH

SEQ ID NO: 2256 - protein, 7 aa, synthetic construct
  REGION 1..7: note = n-mer motif
LQTSVAT

SEQ ID NO: 2257 - protein, 7 aa, synthetic construct
  REGION 1..7: note = n-mer motif
LLGNAPT

SEQ ID NO: 2258 - protein, 7 aa, synthetic construct
  REGION 1..7: note = n-mer motif
ISGSHLN

SEQ ID NO: 2259 - protein, 7 aa, synthetic construct
  REGION 1..7: note = n-mer motif
KSLSSDD

SEQ ID NO: 2260 - protein, 7 aa, synthetic construct
  REGION 1..7: note = n-mer motif
TRTQGTS

SEQ ID NO: 2261 - protein, 7 aa, synthetic construct
  REGION 1..7: note = n-mer motif
VSRSGST

SEQ ID NO: 2262 - protein, 7 aa, synthetic construct
  REGION 1..7: note = n-mer motif
SADTRSP

SEQ ID NO: 2263 - protein, 7 aa, synthetic construct
  REGION 1..7: note = n-mer motif
RDTANGP

SEQ ID NO: 2264 - protein, 7 aa, synthetic construct
  REGION 1..7: note = n-mer motif
MMSNSLA

SEQ ID NO: 2265 - protein, 7 aa, synthetic construct
  REGION 1..7: note = n-mer motif
TGRIELR

SEQ ID NO: 2266 - protein, 7 aa, synthetic construct
  REGION 1..7: note = n-mer motif
ANNAAAS

SEQ ID NO: 2267 - protein, 7 aa, synthetic construct
  REGION 1..7: note = n-mer motif
QLNINDK

SEQ ID NO: 2268 - protein, 7 aa, synthetic construct
  REGION 1..7: note = n-mer motif
MDGAHTS

SEQ ID NO: 2269 - protein, 7 aa, synthetic construct
  REGION 1..7: note = n-mer motif
TSATDSM

SEQ ID NO: 2270 - protein, 7 aa, synthetic construct
  REGION 1..7: note = n-mer motif
AASLSQS

SEQ ID NO: 2271 - protein, 7 aa, synthetic construct
  REGION 1..7: note = n-mer motif
SQAGLLV

SEQ ID NO: 2272 - protein, 7 aa, synthetic construct
  REGION 1..7: note = n-mer motif
TTYSDLS

SEQ ID NO: 2273 - protein, 7 aa, synthetic construct
  REGION 1..7: note = n-mer motif
FSSGTTI

SEQ ID NO: 2274 - protein, 7 aa, synthetic construct
  REGION 1..7: note = n-mer motif
VFTEIES

SEQ ID NO: 2275 - protein, 7 aa, synthetic construct
  REGION 1..7: note = n-mer motif
ADPAKGK

SEQ ID NO: 2276 - protein, 7 aa, synthetic construct
  REGION 1..7: note = n-mer motif
KESEYRV

SEQ ID NO: 2277 - protein, 7 aa, synthetic construct
  REGION 1..7: note = n-mer motif
GMVSLNR

SEQ ID NO: 2278 - protein, 7 aa, synthetic construct
  REGION 1..7: note = n-mer motif
TVIERKD

SEQ ID NO: 2279 - protein, 7 aa, synthetic construct
  REGION 1..7: note = n-mer motif
RIDTLLV

SEQ ID NO: 2280 - protein, 7 aa, synthetic construct
  REGION 1..7: note = n-mer motif
GSTGLPP

SEQ ID NO: 2281 - protein, 7 aa, synthetic construct
  REGION 1..7: note = n-mer motif
MELTSTS

SEQ ID NO: 2282 - protein, 7 aa, synthetic construct
  REGION 1..7: note = n-mer motif
QPGAPQT

SEQ ID NO: 2283 - protein, 7 aa, synthetic construct
  REGION 1..7: note = n-mer motif
NSMGNGG

SEQ ID NO: 2284 - protein, 7 aa, synthetic construct
  REGION 1..7: note = n-mer motif
GSTKSGQ

SEQ ID NO: 2285 - protein, 7 aa, synthetic construct
  REGION 1..7: note = n-mer motif
TFLPQLG

SEQ ID NO: 2286 - protein, 7 aa, synthetic construct
  REGION 1..7: note = n-mer motif
MGINVLS

SEQ ID NO: 2287 - protein, 7 aa, synthetic construct
  REGION 1..7: note = n-mer motif
VNLGISG

SEQ ID NO: 2288 - protein, 7 aa, synthetic construct
  REGION 1..7: note = n-mer motif
SENRAGN

SEQ ID NO: 2289 - protein, 7 aa, synthetic construct
  REGION 1..7: note = n-mer motif
HSNATTI

SEQ ID NO: 2290 - protein, 7 aa, synthetic construct
  REGION 1..7: note = n-mer motif
PGSSASI

SEQ ID NO: 2291 - protein, 7 aa, synthetic construct
  REGION 1..7: note = n-mer motif
ITSLNGM

SEQ ID NO: 2292 - protein, 7 aa, synthetic construct
  REGION 1..7: note = n-mer motif
YLEGAHR

SEQ ID NO: 2293 - protein, 7 aa, synthetic construct
  REGION 1..7: note = n-mer motif
RQVEQSD

SEQ ID NO: 2294 - protein, 7 aa, synthetic construct
  REGION 1..7: note = n-mer motif
SSQSSGS

SEQ ID NO: 2295 - protein, 7 aa, synthetic construct
  REGION 1..7: note = n-mer motif
QLTVGKP

SEQ ID NO: 2296 - protein, 7 aa, synthetic construct
  REGION 1..7: note = n-mer motif
VVHSSIT

SEQ ID NO: 2297 - protein, 7 aa, synthetic construct
  REGION 1..7: note = n-mer motif
LEQLRVP

SEQ ID NO: 2298 - protein, 7 aa, synthetic construct
  REGION 1..7: note = n-mer motif
QHSPKPV

SEQ ID NO: 2299 - protein, 7 aa, synthetic construct
  REGION 1..7: note = n-mer motif
AGSSPSR

SEQ ID NO: 2300 - protein, 7 aa, synthetic construct
  REGION 1..7: note = n-mer motif
GVTIGSR

SEQ ID NO: 2301 - protein, 7 aa, synthetic construct
  REGION 1..7: note = n-mer motif
YIAGGDQ

SEQ ID NO: 2302 - protein, 7 aa, synthetic construct
  REGION 1..7: note = n-mer motif
ISSERFS

SEQ ID NO: 2303 - protein, 7 aa, synthetic construct
  REGION 1..7: note = n-mer motif
RSEGNHA

SEQ ID NO: 2304 - protein, 7 aa, synthetic construct
  REGION 1..7: note = n-mer motif
EKGNSGV

SEQ ID NO: 2305 - protein, 7 aa, synthetic construct
  REGION 1..7: note = n-mer motif
YIVDHAN

SEQ ID NO: 2306 - protein, 7 aa, synthetic construct
  REGION 1..7: note = n-mer motif
RRLSTDL

SEQ ID NO: 2307 - protein, 7 aa, synthetic construct
  REGION 1..7: note = n-mer motif
ANSRLGA

SEQ ID NO: 2308 - protein, 7 aa, synthetic construct
  REGION 1..7: note = n-mer motif
GTAENTS

SEQ ID NO: 2309 - protein, 7 aa, synthetic construct
  REGION 1..7: note = n-mer motif
VRDVAKE

SEQ ID NO: 2310 - protein, 7 aa, synthetic construct
  REGION 1..7: note = n-mer motif
GGLTNGL

SEQ ID NO: 2311 - protein, 7 aa, synthetic construct
  REGION 1..7: note = n-mer motif
PSIPSFS

SEQ ID NO: 2312 - protein, 7 aa, synthetic construct
  REGION 1..7: note = n-mer motif
NALLNAP

SEQ ID NO: 2313 - protein, 7 aa, synthetic construct
  REGION 1..7: note = n-mer motif
DDMVKNS

SEQ ID NO: 2314 - protein, 7 aa, synthetic construct
  REGION 1..7: note = n-mer motif
TANTHAL

SEQ ID NO: 2315 - protein, 7 aa, synthetic construct
  REGION 1..7: note = n-mer motif
VYATALA

SEQ ID NO: 2316 - protein, 7 aa, synthetic construct
  REGION 1..7: note = n-mer motif
GIYPAST

SEQ ID NO: 2317 - protein, 7 aa, synthetic construct
  REGION 1..7: note = n-mer motif
GFDGKQL

SEQ ID NO: 2318 - protein, 7 aa, synthetic construct
  REGION 1..7: note = n-mer motif
HSMSANT

SEQ ID NO: 2319 - protein, 7 aa, synthetic construct
  REGION 1..7: note = n-mer motif
WSIKNQT

SEQ ID NO: 2320 - protein, 7 aa, synthetic construct
  REGION 1..7: note = n-mer motif
TLHTKDL

SEQ ID NO: 2321 - protein, 7 aa, synthetic construct
  REGION 1..7: note = n-mer motif
SYGNTHD

SEQ ID NO: 2322 - protein, 7 aa, synthetic construct
  REGION 1..7: note = n-mer motif
QSGSLVP

SEQ ID NO: 2323 - protein, 7 aa, synthetic construct
  REGION 1..7: note = n-mer motif
NTLQNSH

SEQ ID NO: 2324 - protein, 7 aa, synthetic construct
  REGION 1..7: note = n-mer motif
TAESSHP

SEQ ID NO: 2325 - protein, 7 aa, synthetic construct
  REGION 1..7: note = n-mer motif
ASTVSLY

SEQ ID NO: 2326 - protein, 7 aa, synthetic construct
  REGION 1..7: note = n-mer motif
LTAVAIS

SEQ ID NO: 2327 - protein, 7 aa, synthetic construct
  REGION 1..7: note = n-mer motif
VSGQSAY

SEQ ID NO: 2328 - protein, 7 aa, synthetic construct
  REGION 1..7: note = n-mer motif
GETNFPT

SEQ ID NO: 2329 - protein, 7 aa, synthetic construct
  REGION 1..7: note = n-mer motif
NDNRSMN

SEQ ID NO: 2330 - protein, 7 aa, synthetic construct
  REGION 1..7: note = n-mer motif
RSGDPKN

SEQ ID NO: 2331 - protein, 7 aa, synthetic construct
  REGION 1..7: note = n-mer motif
WESDKFR

SEQ ID NO: 2332 - protein, 7 aa, synthetic construct
  REGION 1..7: note = n-mer motif
QVNHNTS

SEQ ID NO: 2333 - protein, 7 aa, synthetic construct
  REGION 1..7: note = n-mer motif
GWSNNEL

SEQ ID NO: 2334 - protein, 7 aa, synthetic construct
  REGION 1..7: note = n-mer motif
RAVLATN

SEQ ID NO: 2335 - protein, 7 aa, synthetic construct
  REGION 1..7: note = n-mer motif
HMGLNEL

SEQ ID NO: 2336 - protein, 7 aa, synthetic construct
  REGION 1..7: note = n-mer motif
GESSSIS

SEQ ID NO: 2337 - protein, 7 aa, synthetic construct
  REGION 1..7: note = n-mer motif
IHKSSVE

SEQ ID NO: 2338 - protein, 7 aa, synthetic construct
  REGION 1..7: note = n-mer motif
MSGSMIS

SEQ ID NO: 2339 - protein, 7 aa, synthetic construct
  REGION 1..7: note = n-mer motif
LSLAGNR

SEQ ID NO: 2340 - protein, 7 aa, synthetic construct
  REGION 1..7: note = n-mer motif
SATTNHG

SEQ ID NO: 2341 - protein, 7 aa, synthetic construct
  REGION 1..7: note = n-mer motif
STESNAS

SEQ ID NO: 2342 - protein, 7 aa, synthetic construct
  REGION 1..7: note = n-mer motif
PIAERPS

SEQ ID NO: 2343 - protein, 7 aa, synthetic construct
  REGION 1..7: note = n-mer motif
LLPNNTH

SEQ ID NO: 2344 - protein, 7 aa, synthetic construct
  REGION 1..7: note = n-mer motif
GTLKKDA

SEQ ID NO: 2345 - protein, 7 aa, synthetic construct
  REGION 1..7: note = n-mer motif
ALENRSL

SEQ ID NO: 2346 - protein, 7 aa, synthetic construct
  REGION 1..7: note = n-mer motif
TTGNSTM

SEQ ID NO: 2347 - protein, 7 aa, synthetic construct
  REGION 1..7: note = n-mer motif
VYDSAPN

SEQ ID NO: 2348 - protein, 7 aa, synthetic construct
  REGION 1..7: note = n-mer motif
LLSKGDS

SEQ ID NO: 2349 - protein, 7 aa, synthetic construct
  REGION 1..7: note = n-mer motif
SYAINQS

SEQ ID NO: 2350 - protein, 7 aa, synthetic construct
  REGION 1..7: note = n-mer motif
GGGERST

SEQ ID NO: 2351 - protein, 7 aa, synthetic construct
  REGION 1..7: note = n-mer motif
IQVSGSQ

SEQ ID NO: 2352 - protein, 7 aa, synthetic construct
  REGION 1..7: note = n-mer motif
YPVSLSP

SEQ ID NO: 2353 - protein, 7 aa, synthetic construct
  REGION 1..7: note = n-mer motif
ELGNKTA

SEQ ID NO: 2354 - protein, 7 aa, synthetic construct
  REGION 1..7: note = n-mer motif
SGVNFGV

SEQ ID NO: 2355 - protein, 7 aa, synthetic construct
  REGION 1..7: note = n-mer motif
AWSSPSG

SEQ ID NO: 2356 - protein, 7 aa, synthetic construct
  REGION 1..7: note = n-mer motif
GVNYHTT

SEQ ID NO: 2357 - protein, 7 aa, synthetic construct
  REGION 1..7: note = n-mer motif
LIGELKM

SEQ ID NO: 2358 - protein, 7 aa, synthetic construct
  REGION 1..7: note = n-mer motif
YLNSKQL

SEQ ID NO: 2359 - protein, 7 aa, synthetic construct
  REGION 1..7: note = n-mer motif
TVDRPIV

SEQ ID NO: 2360 - protein, 7 aa, synthetic construct
  REGION 1..7: note = n-mer motif
VSKTKDS

SEQ ID NO: 2361 - protein, 7 aa, synthetic construct
  REGION 1..7: note = n-mer motif
QAGNAPR

SEQ ID NO: 2362 - protein, 7 aa, synthetic construct
  REGION 1..7: note = n-mer motif
QDQTSNR

SEQ ID NO: 2363 - protein, 7 aa, synthetic construct
  REGION 1..7: note = n-mer motif
DTTYRNT

SEQ ID NO: 2364 - protein, 7 aa, synthetic construct
  REGION 1..7: note = n-mer motif
GTTEVNK

SEQ ID NO: 2365 - protein, 7 aa, synthetic construct
  REGION 1..7: note = n-mer motif
GFTNTSK

SEQ ID NO: 2366 - protein, 7 aa, synthetic construct
  REGION 1..7: note = n-mer motif
VQKNDVL

SEQ ID NO: 2367 - protein, 7 aa, synthetic construct
  REGION 1..7: note = n-mer motif
SVNNMRL

SEQ ID NO: 2368 - protein, 7 aa, synthetic construct
  REGION 1..7: note = n-mer motif
FSAALPL

SEQ ID NO: 2369 - protein, 7 aa, synthetic construct
  REGION 1..7: note = n-mer motif
DVPNNKR

SEQ ID NO: 2370 - protein, 7 aa, synthetic construct
  REGION 1..7: note = n-mer motif
GETMRHN

SEQ ID NO: 2371 - protein, 7 aa, synthetic construct
  REGION 1..7: note = n-mer motif
IRTSVIN

SEQ ID NO: 2372 - protein, 7 aa, synthetic construct
  REGION 1..7: note = n-mer motif
PRAPGHN

SEQ ID NO: 2373 - protein, 7 aa, synthetic construct
  REGION 1..7: note = n-mer motif
SVAHPLS

SEQ ID NO: 2374 - protein, 7 aa, synthetic construct
  REGION 1..7: note = n-mer motif
MTITVEP

SEQ ID NO: 2375 - protein, 7 aa, synthetic construct
  REGION 1..7: note = n-mer motif
PLNANGS

SEQ ID NO: 2376 - protein, 7 aa, synthetic construct
  REGION 1..7: note = n-mer motif
NRQRDFE

SEQ ID NO: 2377 - protein, 7 aa, synthetic construct
  REGION 1..7: note = n-mer motif
DIHNPRT

SEQ ID NO: 2378 - protein, 7 aa, synthetic construct
  REGION 1..7: note = n-mer motif
WIAGNHS

SEQ ID NO: 2379 - protein, 7 aa, synthetic construct
  REGION 1..7: note = n-mer motif
STHHADR

SEQ ID NO: 2380 - protein, 7 aa, synthetic construct
  REGION 1..7: note = n-mer motif
PESAAKS

SEQ ID NO: 2381 - protein, 7 aa, synthetic construct
  REGION 1..7: note = n-mer motif
HSDKVSS

SEQ ID NO: 2382 - protein, 7 aa, synthetic construct
  REGION 1..7: note = n-mer motif
SNSADAG

SEQ ID NO: 2383 - protein, 7 aa, synthetic construct
  REGION 1..7: note = n-mer motif
EFQRIRE

SEQ ID NO: 2384 - protein, 7 aa, synthetic construct
  REGION 1..7: note = n-mer motif
SAGMTLD

SEQ ID NO: 2385 - protein, 7 aa, synthetic construct
  REGION 1..7: note = n-mer motif
TQTSTWT

SEQ ID NO: 2386 - protein, 7 aa, synthetic construct
  REGION 1..7: note = n-mer motif
TTLTQTD

SEQ ID NO: 2387 - protein, 7 aa, synthetic construct
  REGION 1..7: note = n-mer motif
ASKGFGH

SEQ ID NO: 2388 - protein, 7 aa, synthetic construct
  REGION 1..7: note = n-mer motif
PATMISE

SEQ ID NO: 2389 - protein, 7 aa, synthetic construct
  REGION 1..7: note = n-mer motif
TDSSADS

SEQ ID NO: 2390 - protein, 7 aa, synthetic construct
  REGION 1..7: note = n-mer motif
STRKEHD

SEQ ID NO: 2391 - protein, 7 aa, synthetic construct
  REGION 1..7: note = n-mer motif
GDISYRV

SEQ ID NO: 2392 - protein, 7 aa, synthetic construct
  REGION 1..7: note = n-mer motif
MGYVDSL

SEQ ID NO: 2393 - protein, 7 aa, synthetic construct
  REGION 1..7: note = n-mer motif
QTITSQM

SEQ ID NO: 2394 - protein, 7 aa, synthetic construct
  REGION 1..7: note = n-mer motif
SIGYSPP

SEQ ID NO: 2395 - protein, 7 aa, synthetic construct
  REGION 1..7: note = n-mer motif
SSPDSYR

SEQ ID NO: 2396 - protein, 7 aa, synthetic construct
  REGION 1..7: note = n-mer motif
ISPSASN

SEQ ID NO: 2397 - protein, 7 aa, synthetic construct
  REGION 1..7: note = n-mer motif
YPADHRT

SEQ ID NO: 2398 - protein, 7 aa, synthetic construct
  REGION 1..7: note = n-mer motif
HTGQTPS

SEQ ID NO: 2399 - protein, 7 aa, synthetic construct
  REGION 1..7: note = n-mer motif
QTTILAA

SEQ ID NO: 2400 - protein, 7 aa, synthetic construct
  REGION 1..7: note = n-mer motif
DGTRQVH

SEQ ID NO: 2401 - protein, 7 aa, synthetic construct
  REGION 1..7: note = n-mer motif
RSSPATN

SEQ ID NO: 2402 - protein, 7 aa, synthetic construct
  REGION 1..7: note = n-mer motif
AMSHTYK

SEQ ID NO: 2403 - protein, 7 aa, synthetic construct
  REGION 1..7: note = n-mer motif
MAAPPEH

SEQ ID NO: 2404 - protein, 7 aa, synthetic construct
  REGION 1..7: note = n-mer motif
GPSTSEA

SEQ ID NO: 2405 - protein, 7 aa, synthetic construct
  REGION 1..7: note = n-mer motif
HNHDRSS

SEQ ID NO: 2406 - protein, 7 aa, synthetic construct
  REGION 1..7: note = n-mer motif
VVPSTQA

SEQ ID NO: 2407 - protein, 7 aa, synthetic construct
  REGION 1..7: note = n-mer motif
IPVTTRN

SEQ ID NO: 2408 - protein, 7 aa, synthetic construct
  REGION 1..7: note = n-mer motif
NQLVRGT

SEQ ID NO: 2409 - protein, 7 aa, synthetic construct
  REGION 1..7: note = n-mer motif
GFALTGT

SEQ ID NO: 2410 - protein, 7 aa, synthetic construct
  REGION 1..7: note = n-mer motif
SKGGDMV

SEQ ID NO: 2411 - protein, 7 aa, synthetic construct
  REGION 1..7: note = n-mer motif
ARPGQSM

SEQ ID NO: 2412 - protein, 7 aa, synthetic construct
  REGION 1..7: note = n-mer motif
KADYESS

SEQ ID NO: 2413 - protein, 7 aa, synthetic construct
  REGION 1..7: note = n-mer motif
GPSSHIV

SEQ ID NO: 2414 - protein, 7 aa, synthetic construct
  REGION 1..7: note = n-mer motif
EVVKTTH

SEQ ID NO: 2415 - protein, 7 aa, synthetic construct
  REGION 1..7: note = n-mer motif
TLDNNHS

SEQ ID NO: 2416 - protein, 7 aa, synthetic construct
  REGION 1..7: note = n-mer motif
TIYNMGP

SEQ ID NO: 2417 - protein, 7 aa, synthetic construct
  REGION 1..7: note = n-mer motif
STMNTIT

SEQ ID NO: 2418 - protein, 7 aa, synthetic construct
  REGION 1..7: note = n-mer motif
TLARTTE

SEQ ID NO: 2419 - protein, 7 aa, synthetic construct
  REGION 1..7: note = n-mer motif
LISSQTS

SEQ ID NO: 2420 - protein, 7 aa, synthetic construct
  REGION 1..7: note = n-mer motif
QTASGDT

SEQ ID NO: 2421 - protein, 7 aa, synthetic construct
  REGION 1..7: note = n-mer motif
AHGAFPV

SEQ ID NO: 2422 - protein, 7 aa, synthetic construct
  REGION 1..7: note = n-mer motif
GETRSTA

SEQ ID NO: 2423 - protein, 7 aa, synthetic construct
  REGION 1..7: note = n-mer motif
NNYAYSA

SEQ ID NO: 2424 - protein, 7 aa, synthetic construct
  REGION 1..7: note = n-mer motif
EAYQTEK

SEQ ID NO: 2425 - protein, 7 aa, synthetic construct
  REGION 1..7: note = n-mer motif
SLAHAVS

SEQ ID NO: 2426 - protein, 7 aa, synthetic construct
  REGION 1..7: note = n-mer motif
TYQLSGN

SEQ ID NO: 2427 - protein, 7 aa, synthetic construct
  REGION 1..7: note = n-mer motif
MSERLRI

SEQ ID NO: 2428 - protein, 7 aa, synthetic construct
  REGION 1..7: note = n-mer motif
GSGKDPG

SEQ ID NO: 2429 - protein, 7 aa, synthetic construct
  REGION 1..7: note = n-mer motif
YNSNASV

SEQ ID NO: 2430 - protein, 7 aa, synthetic construct
  REGION 1..7: note = n-mer motif
TRGDMEF

SEQ ID NO: 2431 - protein, 7 aa, synthetic construct
  REGION 1..7: note = n-mer motif
GITGSPG

SEQ ID NO: 2432 - protein, 7 aa, synthetic construct
  REGION 1..7: note = n-mer motif
QHTAHPM

SEQ ID NO: 2433 - protein, 7 aa, synthetic construct
  REGION 1..7: note = n-mer motif
DTANRST

SEQ ID NO: 2434 - protein, 7 aa, synthetic construct
  REGION 1..7: note = n-mer motif
SAHDARL

SEQ ID NO: 2435 - protein, 7 aa, synthetic construct
  REGION 1..7: note = n-mer motif
LNHTLGH

SEQ ID NO: 2436 - protein, 7 aa, synthetic construct
  REGION 1..7: note = n-mer motif
GFETSSP

SEQ ID NO: 2437 - protein, 7 aa, synthetic construct
  REGION 1..7: note = n-mer motif
GTSAESR

SEQ ID NO: 2438 - protein, 7 aa, synthetic construct
  REGION 1..7: note = n-mer motif
HANYVEV

SEQ ID NO: 2439 - protein, 7 aa, synthetic construct
  REGION 1..7: note = n-mer motif
TTKPVAE

SEQ ID NO: 2440 - protein, 7 aa, synthetic construct
  REGION 1..7: note = n-mer motif
STAVTNS

SEQ ID NO: 2441 - protein, 7 aa, synthetic construct
  REGION 1..7: note = n-mer motif
LGLAGQV

SEQ ID NO: 2442 - protein, 7 aa, synthetic construct
  REGION 1..7: note = n-mer motif
VLKGTFP

SEQ ID NO: 2443 - protein, 7 aa, synthetic construct
  REGION 1..7: note = n-mer motif
MNEPGRT

SEQ ID NO: 2444 - protein, 7 aa, synthetic construct
  REGION 1..7: note = n-mer motif
TSDPLRN

SEQ ID NO: 2445 - protein, 7 aa, synthetic construct
  REGION 1..7: note = n-mer motif
RDTNTDK

SEQ ID NO: 2446 - protein, 7 aa, synthetic construct
  REGION 1..7: note = n-mer motif
ESDLRQR

SEQ ID NO: 2447 - protein, 7 aa, synthetic construct
  REGION 1..7: note = n-mer motif
SGMAGLS

SEQ ID NO: 2448 - protein, 7 aa, synthetic construct
  REGION 1..7: note = n-mer motif
IATTSGR

SEQ ID NO: 2449 - protein, 7 aa, synthetic construct
  REGION 1..7: note = n-mer motif
TIRSEGF

SEQ ID NO: 2450 - protein, 7 aa, synthetic construct
  REGION 1..7: note = n-mer motif
GLSITIA

SEQ ID NO: 2451 - protein, 7 aa, synthetic construct
  REGION 1..7: note = n-mer motif
PPTNGRM

SEQ ID NO: 2452 - protein, 7 aa, synthetic construct
  REGION 1..7: note = n-mer motif
LQDRATN

SEQ ID NO: 2453 - protein, 7 aa, synthetic construct
  REGION 1..7: note = n-mer motif
LKSTGDH

SEQ ID NO: 2454 - protein, 7 aa, synthetic construct
  REGION 1..7: note = n-mer motif
DNNNQVY

SEQ ID NO: 2455 - protein, 7 aa, synthetic construct
  REGION 1..7: note = n-mer motif
VHMESYA

SEQ ID NO: 2456 - protein, 7 aa, synthetic construct
  REGION 1..7: note = n-mer motif
DQIGHGT

SEQ ID NO: 2457 - protein, 7 aa, synthetic construct
  REGION 1..7: note = n-mer motif
GTGPHGT

SEQ ID NO: 2458 - protein, 7 aa, synthetic construct
  REGION 1..7: note = n-mer motif
IGNNTGL

SEQ ID NO: 2459 - protein, 7 aa, synthetic construct
  REGION 1..7: note = n-mer motif
LNAEYTN

SEQ ID NO: 2460 - protein, 7 aa, synthetic construct
  REGION 1..7: note = n-mer motif
VTSSASG

SEQ ID NO: 2461 - protein, 7 aa, synthetic construct
  REGION 1..7: note = n-mer motif
THVAKPD

SEQ ID NO: 2462 - protein, 7 aa, synthetic construct
  REGION 1..7: note = n-mer motif
PMNKDIL

SEQ ID NO: 2463 - protein, 7 aa, synthetic construct
  REGION 1..7: note = n-mer motif
LSLNMNE

SEQ ID NO: 2464 - protein, 7 aa, synthetic construct
  REGION 1..7: note = n-mer motif
VGNSSTH

SEQ ID NO: 2465 - protein, 7 aa, synthetic construct
  REGION 1..7: note = n-mer motif
GHGSDLT

SEQ ID NO: 2466 - protein, 7 aa, synthetic construct
  REGION 1..7: note = n-mer motif
LTQNPTN

SEQ ID NO: 2467 - protein, 7 aa, synthetic construct
  REGION 1..7: note = n-mer motif
PSDHMRT

SEQ ID NO: 2468 - protein, 7 aa, synthetic construct
  REGION 1..7: note = n-mer motif
PDSRLAA

SEQ ID NO: 2469 - protein, 7 aa, synthetic construct
  REGION 1..7: note = n-mer motif
WGSEGTI

SEQ ID NO: 2470 - protein, 7 aa, synthetic construct
  REGION 1..7: note = n-mer motif
KPTNDSY

SEQ ID NO: 2471 - protein, 7 aa, synthetic construct
  REGION 1..7: note = n-mer motif
NRGTEVY

SEQ ID NO: 2472 - protein, 7 aa, synthetic construct
  REGION 1..7: note = n-mer motif
HVITTKD

SEQ ID NO: 2473 - protein, 7 aa, synthetic construct
  REGION 1..7: note = n-mer motif
IVSNPPA

SEQ ID NO: 2474 - protein, 7 aa, synthetic construct
  REGION 1..7: note = n-mer motif
MRNDQQL

SEQ ID NO: 2475 - protein, 7 aa, synthetic construct
  REGION 1..7: note = n-mer motif
FQRDVGH

SEQ ID NO: 2476 - protein, 7 aa, synthetic construct
  REGION 1..7: note = n-mer motif
ANDNTKQ

SEQ ID NO: 2477 - protein, 7 aa, synthetic construct
  REGION 1..7: note = n-mer motif
SVPHAGD

SEQ ID NO: 2478 - protein, 7 aa, synthetic construct
  REGION 1..7: note = n-mer motif
NATPPNH

SEQ ID NO: 2479 - protein, 7 aa, synthetic construct
  REGION 1..7: note = n-mer motif
SEHTSVL

SEQ ID NO: 2480 - protein, 7 aa, synthetic construct
  REGION 1..7: note = n-mer motif
AMSQTDI

SEQ ID NO: 2481 - protein, 7 aa, synthetic construct
  REGION 1..7: note = n-mer motif
PKAPLNN

SEQ ID NO: 2482 - protein, 7 aa, synthetic construct
  REGION 1..7: note = n-mer motif
TNNLLAQ

SEQ ID NO: 2483 - protein, 7 aa, synthetic construct
  REGION 1..7: note = n-mer motif
QRQGSGV

SEQ ID NO: 2484 - protein, 7 aa, synthetic construct
  REGION 1..7: note = n-mer motif
RSDTTNA

SEQ ID NO: 2485 - protein, 7 aa, synthetic construct
  REGION 1..7: note = n-mer motif
EADKNGV

SEQ ID NO: 2486 - protein, 7 aa, synthetic construct
  REGION 1..7: note = n-mer motif
MLGGFAQ

SEQ ID NO: 2487 - protein, 7 aa, synthetic construct
  REGION 1..7: note = n-mer motif
MTHLSTD

SEQ ID NO: 2488 - protein, 7 aa, synthetic construct
  REGION 1..7: note = n-mer motif
VLSDKAF

SEQ ID NO: 2489 - protein, 7 aa, synthetic construct
  REGION 1..7: note = n-mer motif
TPSGTIK

SEQ ID NO: 2490 - protein, 7 aa, synthetic construct
  REGION 1..7: note = n-mer motif
IILMGQS

SEQ ID NO: 2491 - protein, 7 aa, synthetic construct
  REGION 1..7: note = n-mer motif
LSGGETL

SEQ ID NO: 2492 - protein, 7 aa, synthetic construct
  REGION 1..7: note = n-mer motif
TDGALGY

SEQ ID NO: 2493 - protein, 7 aa, synthetic construct
  REGION 1..7: note = n-mer motif
GNKAALT

SEQ ID NO: 2494 - DNA, 21 bp, synthetic construct
  source 1..21: mol_type = other DNA
  misc_feature 1..21: note = n-mer motif encoding polynucleotide
agaggagacttgacaacccca

SEQ ID NO: 2495 - DNA, 21 bp, synthetic construct
  source 1..21: mol_type = other DNA
  misc_feature 1..21: note = n-mer motif encoding polynucleotide
cggggtgatcttaatcagtat

SEQ ID NO: 2496 - DNA, 21 bp, synthetic construct
  source 1..21: mol_type = other DNA
  misc_feature 1..21: note = n-mer motif encoding polynucleotide
aggggtgatctttctacgcct

SEQ ID NO: 2497 - DNA, 21 bp, synthetic construct
  misc_feature 1..21: note = n-mer motif encoding polynucleotide
  source 1..21: mol_type = other DNA
cggggtgatcagctttatcat

SEQ ID NO: 2498 - DNA, 21 bp, synthetic construct
  source 1..21: mol_type = other DNA
  misc_feature 1..21: note = n-mer motif encoding polynucleotide
cgaggagacaccatgagcaaa

SEQ ID NO: 2499 - DNA, 21 bp, synthetic construct
  source 1..21: mol_type = other DNA
  misc_feature 1..21: note = n-mer motif encoding polynucleotide
aggggggatgcgacggagctt

SEQ ID NO: 2500 - DNA, 21 bp, synthetic construct
  source 1..21: mol_type = other DNA
  misc_feature 1..21: note = n-mer motif encoding polynucleotide
agaggcgacttatccacaccc

SEQ ID NO: 2501 - DNA, 21 bp, synthetic construct
  misc_feature 1..21: note = n-mer motif encoding polynucleotide
  source 1..21: mol_type = other DNA
cgcggcgacatgataaacacc

SEQ ID NO: 2502 - DNA, 21 bp, synthetic construct
  misc_feature 1..21: note = n-mer motif encoding polynucleotide
  source 1..21: mol_type = other DNA
aggggcgacctgaaccaatac

SEQ ID NO: 2503 - DNA, 21 bp, synthetic construct
  misc_feature 1..21: note = n-mer motif encoding polynucleotide
  source 1..21: mol_type = other DNA
cggggggatactatgtctaag

SEQ ID NO: 2504 - DNA, 21 bp, synthetic construct
  misc_feature 1..21: note = n-mer motif encoding polynucleotide
  source 1..21: mol_type = other DNA
cggggtgatcttactacgcct

SEQ ID NO: 2505 - DNA, 21 bp, synthetic construct
  misc_feature 1..21: note = n-mer motif encoding polynucleotide
  source 1..21: mol_type = other DNA
aggggcgacctcaacgacagc

SEQ ID NO: 2506 - DNA, 21 bp, synthetic construct
  misc_feature 1..21: note = n-mer motif encoding polynucleotide
  source 1..21: mol_type = other DNA
gcaaaccccaacatactagac

SEQ ID NO: 2507 - DNA, 21 bp, synthetic construct
  misc_feature 1..21: note = n-mer motif encoding polynucleotide
  source 1..21: mol_type = other DNA
cgaggcgacacaatgaactac

SEQ ID NO: 2508 - DNA, 21 bp, synthetic construct
  source 1..21: mol_type = other DNA
  misc_feature 1..21: note = n-mer motif encoding polynucleotide
atgagtaatttggggtatgag

SEQ ID NO: 2509 - DNA, 21 bp, synthetic construct
  source 1..21: mol_type = other DNA
  misc_feature 1..21: note = n-mer motif encoding polynucleotide
tacacctctcaaaccagcact

SEQ ID NO: 2510 - DNA, 21 bp, synthetic construct
  source 1..21: mol_type = other DNA
  misc_feature 1..21: note = n-mer motif encoding polynucleotide
ctcggaggaaacagcaggttc

SEQ ID NO: 2511 - DNA, 21 bp, synthetic construct
  misc_feature 1..21: note = n-mer motif encoding polynucleotide
  source 1..21: mol_type = other DNA
caaagccaagcgatacaacta

SEQ ID NO: 2512 - DNA, 21 bp, synthetic construct
  source 1..21: mol_type = other DNA
  misc_feature 1..21: note = n-mer motif encoding polynucleotide
aacacgtacacaccgggaaaa

SEQ ID NO: 2513 - DNA, 21 bp, synthetic construct
  misc_feature 1..21: note = n-mer motif encoding polynucleotide
  source 1..21: mol_type = other DNA
ggggcggaagcgggccgccaa

SEQ ID NO: 2514 - DNA, 21 bp, synthetic construct
  source 1..21: mol_type = other DNA
  misc_feature 1..21: note = n-mer motif encoding polynucleotide
gaacacgctacagcaaaacaa

SEQ ID NO: 2515 - DNA, 21 bp, synthetic construct
  source 1..21: mol_type = other DNA
  misc_feature 1..21: note = n-mer motif encoding polynucleotide
gcggcacaactcgtcagtcca

SEQ ID NO: 2516 - DNA, 21 bp, synthetic construct
  source 1..21: mol_type = other DNA
  misc_feature 1..21: note = n-mer motif encoding polynucleotide
gatcagacggctagtattgtt

SEQ ID NO: 2517 - DNA, 21 bp, synthetic construct
  misc_feature 1..21: note = n-mer motif encoding polynucleotide
  source 1..21: mol_type = other DNA
gttcaaacccacataggagtc

SEQ ID NO: 2518 - DNA, 21 bp, synthetic construct
  source 1..21: mol_type = other DNA
  misc_feature 1..21: note = n-mer motif encoding polynucleotide
tcttatggtaatactcatgat

SEQ ID NO: 2519 - DNA, 21 bp, synthetic construct
  source 1..21: mol_type = other DNA
  misc_feature 1..21: note = n-mer motif encoding polynucleotide
acctccacggcttcaaaacaa

SEQ ID NO: 2520 - DNA, 21 bp, synthetic construct
  source 1..21: mol_type = other DNA
  misc_feature 1..21: note = n-mer motif encoding polynucleotide
ttggtgactcatgagcggatt

SEQ ID NO: 2521 - DNA, 21 bp, synthetic construct
  misc_feature 1..21: note = n-mer motif encoding polynucleotide
  source 1..21: mol_type = other DNA
atggataagtctaataattct

SEQ ID NO: 2522 - DNA, 21 bp, synthetic construct
  source 1..21: mol_type = other DNA
  misc_feature 1..21: note = n-mer motif encoding polynucleotide
cgtggtgatatgtctcgtgag

SEQ ID NO: 2523 - DNA, 21 bp, synthetic construct
  misc_feature 1..21: note = n-mer motif encoding polynucleotide
  source 1..21: mol_type = other DNA
cgcggtgacgtggcagaaata

SEQ ID NO: 2524 - DNA, 21 bp, synthetic construct
  source 1..21: mol_type = other DNA
  misc_feature 1..21: note = n-mer motif encoding polynucleotide
ggtggcgaaaacagaacccca

SEQ ID NO: 2525 - DNA, 21 bp, synthetic construct
  source 1..21: mol_type = other DNA
  misc_feature 1..21: note = n-mer motif encoding polynucleotide
gctgggcatcagcagcttgct

SEQ ID NO: 2526 - DNA, 21 bp, synthetic construct
  misc_feature 1..21: note = n-mer motif encoding polynucleotide
  source 1..21: mol_type = other DNA
cgtcttaatagtagtatgaat

SEQ ID NO: 2527 - DNA, 21 bp, synthetic construct
  misc_feature 1..21: note = n-mer motif encoding polynucleotide
  source 1..21: mol_type = other DNA
tattatgagaagcttagtgcg

SEQ ID NO: 2528 - DNA, 21 bp, synthetic construct
  misc_feature 1..21: note = n-mer motif encoding polynucleotide
  source 1..21: mol_type = other DNA
gaagcgtccaactacgaacga

SEQ ID NO: 2529 - DNA, 21 bp, synthetic construct
  misc_feature 1..21: note = n-mer motif encoding polynucleotide
  source 1..21: mol_type = other DNA
ttccaaactgacacgcaccga

SEQ ID NO: 2530 - DNA, 21 bp, synthetic construct
  source 1..21: mol_type = other DNA
  misc_feature 1..21: note = n-mer motif encoding polynucleotide
aacagttcccaatggcccaac

SEQ ID NO: 2531 - DNA, 21 bp, synthetic construct
  misc_feature 1..21: note = n-mer motif encoding polynucleotide
  source 1..21: mol_type = other DNA
gatggtaagactacgtctaat

SEQ ID NO: 2532 - DNA, 21 bp, synthetic construct
  source 1..21: mol_type = other DNA
  misc_feature 1..21: note = n-mer motif encoding polynucleotide
gctgtgcatgcgactagtagt

SEQ ID NO: 2533 - DNA, 21 bp, synthetic construct
  misc_feature 1..21: note = n-mer motif encoding polynucleotide
  source 1..21: mol_type = other DNA
aaaacactccccggcagggaa

SEQ ID NO: 2534 - DNA, 21 bp, synthetic construct
  misc_feature 1..21: note = n-mer motif encoding polynucleotide
  source 1..21: mol_type = other DNA
atactgaaatccgacgcacca

SEQ ID NO: 2535 - DNA, 21 bp, synthetic construct
  misc_feature 1..21: note = n-mer motif encoding polynucleotide
  source 1..21: mol_type = other DNA
agtacgaatgaggctcctaag

SEQ ID NO: 2536 - DNA, 21 bp, synthetic construct
  misc_feature 1..21: note = n-mer motif encoding polynucleotide
  source 1..21: mol_type = other DNA
tttgatagtgcgaatggtcgg

SEQ ID NO: 2537 - DNA, 21 bp, synthetic construct
  source 1..21: mol_type = other DNA
  misc_feature 1..21: note = n-mer motif encoding polynucleotide
atggacgctgcgtacggtagt

SEQ ID NO: 2538 - DNA, 21 bp, synthetic construct
  source 1..21: mol_type = other DNA
  misc_feature 1..21: note = n-mer motif encoding polynucleotide
aacaaagaccacaaccacctg

SEQ ID NO: 2539 - DNA, 21 bp, synthetic construct
  misc_feature 1..21: note = n-mer motif encoding polynucleotide
  source 1..21: mol_type = other DNA
ggtcagtatagtcagacgctt

SEQ ID NO: 2540 - DNA, 21 bp, synthetic construct
  source 1..21: mol_type = other DNA
  misc_feature 1..21: note = n-mer motif encoding polynucleotide
gaagcattcccgcgagcgggc

SEQ ID NO: 2541 - DNA, 21 bp, synthetic construct
  misc_feature 1..21: note = n-mer motif encoding polynucleotide
  source 1..21: mol_type = other DNA
gaacacactcacttaaacccg

SEQ ID NO: 2542 - DNA, 21 bp, synthetic construct
  source 1..21: mol_type = other DNA
  misc_feature 1..21: note = n-mer motif encoding polynucleotide
atgcaacgcgaagacgcgaac

SEQ ID NO: 2543 - DNA, 21 bp, synthetic construct
  misc_feature 1..21: note = n-mer motif encoding polynucleotide
  source 1..21: mol_type = other DNA
ctaaccggctctgacatgaaa

SEQ ID NO: 2544 - DNA, 21 bp, synthetic construct
  misc_feature 1..21: note = n-mer motif encoding polynucleotide
  source 1..21: mol_type = other DNA
cgagtaaacaacgacgcaata

SEQ ID NO: 2545 - DNA, 21 bp, synthetic construct
  source 1..21: mol_type = other DNA
  misc_feature 1..21: note = n-mer motif encoding polynucleotide
cgtggtgaccaaggcacacac

SEQ ID NO: 2546 - DNA, 21 bp, synthetic construct
  misc_feature 1..21: note = n-mer motif encoding polynucleotide
  source 1..21: mol_type = other DNA
attaatattagtagtgatttt

SEQ ID NO: 2547 - DNA, 21 bp, synthetic construct
  misc_feature 1..21: note = n-mer motif encoding polynucleotide
  source 1..21: mol_type = other DNA
aataatgataatggttttgtt

SEQ ID NO: 2548 - DNA, 21 bp, synthetic construct
  source 1..21: mol_type = other DNA
  misc_feature 1..21: note = n-mer motif encoding polynucleotide
ttcatcgctaacactaaccca

SEQ ID NO: 2549 - DNA, 21 bp, synthetic construct
  misc_feature 1..21: note = n-mer motif encoding polynucleotide
  source 1..21: mol_type = other DNA
ggactgcacggcaccaacgca

SEQ ID NO: 2550 - DNA, 21 bp, synthetic construct
  misc_feature 1..21: note = n-mer motif encoding polynucleotide
  source 1..21: mol_type = other DNA
aaaaccatcgacatagcacaa

SEQ ID NO: 2551 - DNA, 21 bp, synthetic construct
  misc_feature 1..21: note = n-mer motif encoding polynucleotide
  source 1..21: mol_type = other DNA
tcgagtgattctcgtattccg

SEQ ID NO: 2552 - DNA, 21 bp, synthetic construct
  source 1..21: mol_type = other DNA
  misc_feature 1..21: note = n-mer motif encoding polynucleotide
tctacatctccggttaacagc

SEQ ID NO: 2553 - DNA, 21 bp, synthetic construct
  source 1..21: mol_type = other DNA
  misc_feature 1..21: note = n-mer motif encoding polynucleotide
gccagcatgccctctgtagac

SEQ ID NO: 2554 - DNA, 21 bp, synthetic construct
  misc_feature 1..21: note = n-mer motif encoding polynucleotide
  source 1..21: mol_type = other DNA
ggtcataatatggcacaggcg

SEQ ID NO: 2555 - DNA, 21 bp, synthetic construct
  misc_feature 1..21: note = n-mer motif encoding polynucleotide
  source 1..21: mol_type = other DNA
cacaacaaaccaaacggagac

SEQ ID NO: 2556 - DNA, 21 bp, synthetic construct
  source 1..21: mol_type = other DNA
  misc_feature 1..21: note = n-mer motif encoding polynucleotide
tacaggatggaaacgaaccca

SEQ ID NO: 2557 - DNA, 21 bp, synthetic construct
  source 1..21: mol_type = other DNA
  misc_feature 1..21: note = n-mer motif encoding polynucleotide
cttgggaatgtggttcatccg

SEQ ID NO: 2558 - DNA, 21 bp, synthetic construct
  source 1..21: mol_type = other DNA
  misc_feature 1..21: note = n-mer motif encoding polynucleotide
gtaacggcacaccaattatcc

SEQ ID NO: 2559 - DNA, 21 bp, synthetic construct
  misc_feature 1..21: note = n-mer motif encoding polynucleotide
  source 1..21: mol_type = other DNA
actatggtagaagtactgcca

SEQ ID NO: 2560 - DNA, 21 bp, synthetic construct
  misc_feature 1..21: note = n-mer motif encoding polynucleotide
  source 1..21: mol_type = other DNA
atcaaagggtctgggtcgcaa

SEQ ID NO: 2561 - DNA, 21 bp, synthetic construct
  source 1..21: mol_type = other DNA
  misc_feature 1..21: note = n-mer motif encoding polynucleotide
actaatggggggtcgcttaat

SEQ ID NO: 2562 - DNA, 21 bp, synthetic construct
  misc_feature 1..21: note = n-mer motif encoding polynucleotide
  source 1..21: mol_type = other DNA
ctcggaggaaacagcaggatc

SEQ ID NO: 2563 - DNA, 21 bp, synthetic construct
  source 1..21: mol_type = other DNA
  misc_feature 1..21: note = n-mer motif encoding polynucleotide
aggggtgatgcggcgaataag

SEQ ID NO: 2564 - DNA, 21 bp, synthetic construct
  source 1..21: mol_type = other DNA
  misc_feature 1..21: note = n-mer motif encoding polynucleotide
gcgttaaacgcccaagggatc

SEQ ID NO: 2565 - DNA, 21 bp, synthetic construct
  source 1..21: mol_type = other DNA
  misc_feature 1..21: note = n-mer motif encoding polynucleotide
gctgagcatgcgactagtagt

SEQ ID NO: 2566 - DNA, 21 bp, synthetic construct
  misc_feature 1..21: note = n-mer motif encoding polynucleotide
  source 1..21: mol_type = other DNA
tacttgaccaccggtactgcc

SEQ ID NO: 2567 - DNA, 21 bp, synthetic construct
  source 1..21: mol_type = other DNA
  misc_feature 1..21: note = n-mer motif encoding polynucleotide
gcggaggctcagacgcgtgtg

SEQ ID NO: 2568 - DNA, 21 bp, synthetic construct
  misc_feature 1..21: note = n-mer motif encoding polynucleotide
  source 1..21: mol_type = other DNA
gctgagcaggggctgtcttcg

SEQ ID NO: 2569 - DNA, 21 bp, synthetic construct
  misc_feature 1..21: note = n-mer motif encoding polynucleotide
  source 1..21: mol_type = other DNA
ctgattgttactcagcatgtg

SEQ ID NO: 2570 - DNA, 21 bp, synthetic construct
  misc_feature 1..21: note = n-mer motif encoding polynucleotide
  source 1..21: mol_type = other DNA
tctagttatcagtctgggctg

SEQ ID NO: 2571 - DNA, 21 bp, synthetic construct
  source 1..21: mol_type = other DNA
  misc_feature 1..21: note = n-mer motif encoding polynucleotide
gctacggtttataatgagttg

SEQ ID NO: 2572 - DNA, 21 bp, synthetic construct
  source 1..21: mol_type = other DNA
  misc_feature 1..21: note = n-mer motif encoding polynucleotide
catgatacggttggggagagg

SEQ ID NO: 2573 - DNA, 21 bp, synthetic construct
  source 1..21: mol_type = other DNA
  misc_feature 1..21: note = n-mer motif encoding polynucleotide
cgtggggatttgaatgattct

SEQ ID NO: 2574 - DNA, 21 bp, synthetic construct
  misc_feature 1..21: note = n-mer motif encoding polynucleotide
  source 1..21: mol_type = other DNA
catgatattagtctggatcgt

SEQ ID NO: 2575 - DNA, 21 bp, synthetic construct
  source 1..21: mol_type = other DNA
  misc_feature 1..21: note = n-mer motif encoding polynucleotide
acagaacaatcttactcacga

SEQ ID NO: 2576 - DNA, 21 bp, synthetic construct
  misc_feature 1..21: note = n-mer motif encoding polynucleotide
  source 1..21: mol_type = other DNA
tggtgaggggctgagtttgcc

SEQ ID NO: 2577 - DNA, 21 bp, synthetic construct
  source 1..21: mol_type = other DNA
  misc_feature 1..21: note = n-mer motif encoding polynucleotide
gctgtgcatgcgactagtaga

SEQ ID NO: 2578 - DNA, 21 bp, synthetic construct
  source 1..21: mol_type = other DNA
  misc_feature 1..21: note = n-mer motif encoding polynucleotide
attgagagtaagactgtgcag

SEQ ID NO: 2579 - DNA, 21 bp, synthetic construct
  source 1..21: mol_type = other DNA
  misc_feature 1..21: note = n-mer motif encoding polynucleotide
acgaatgttagtacgcttttg

SEQ ID NO: 2580 - DNA, 21 bp, synthetic construct
  misc_feature 1..21: note = n-mer motif encoding polynucleotide
  source 1..21: mol_type = other DNA
ccacccaacggcagcagtaga

SEQ ID NO: 2581 - DNA, 21 bp, synthetic construct
  source 1..21: mol_type = other DNA
  misc_feature 1..21: note = n-mer motif encoding polynucleotide
ccctctacacacggctacgta

SEQ ID NO: 2582 - DNA, 21 bp, synthetic construct
  source 1..21: mol_type = other DNA
  misc_feature 1..21: note = n-mer motif encoding polynucleotide
actgcggctagtactgcgagg

SEQ ID NO: 2583 - DNA, 21 bp, synthetic construct
  source 1..21: mol_type = other DNA
  misc_feature 1..21: note = n-mer motif encoding polynucleotide
tacaacgcaggcggagaacaa

SEQ ID NO: 2584 - DNA, 21 bp, synthetic construct
  misc_feature 1..21: note = n-mer motif encoding polynucleotide
  source 1..21: mol_type = other DNA
acccacaaccaacgtgaactg

SEQ ID NO: 2585 - DNA, 21 bp, synthetic construct
  source 1..21: mol_type = other DNA
  misc_feature 1..21: note = n-mer motif encoding polynucleotide
accttcacggtcgacggtaga

SEQ ID NO: 2586 - DNA, 21 bp, synthetic construct
  source 1..21: mol_type = other DNA
  misc_feature 1..21: note = n-mer motif encoding polynucleotide
cactccagccccgggtcgtca

SEQ ID NO: 2587 - DNA, 21 bp, synthetic construct
  misc_feature 1..21: note = n-mer motif encoding polynucleotide
  source 1..21: mol_type = other DNA
agtacgagtggttataatact

SEQ ID NO: 2588 - DNA, 21 bp, synthetic construct
  source 1..21: mol_type = other DNA
  misc_feature 1..21: note = n-mer motif encoding polynucleotide
tctgagaagctgactgataag

SEQ ID NO: 2589 - DNA, 21 bp, synthetic construct
  source 1..21: mol_type = other DNA
  misc_feature 1..21: note = n-mer motif encoding polynucleotide
gggaggaacacaagtaacttg

SEQ ID NO: 2590 - DNA, 21 bp, synthetic construct
  source 1..21: mol_type = other DNA
  misc_feature 1..21: note = n-mer motif encoding polynucleotide
accggaacagcgatctcccga

SEQ ID NO: 2591 - DNA, 21 bp, synthetic construct
  source 1..21: mol_type = other DNA
  misc_feature 1..21: note = n-mer motif encoding polynucleotide
tctatgcaggatccttctttg

SEQ ID NO: 2592 - DNA, 21 bp, synthetic construct
  misc_feature 1..21: note = n-mer motif encoding polynucleotide
  source 1..21: mol_type = other DNA
actcggagtgatattggtgtg

SEQ ID NO: 2593 - DNA, 21 bp, synthetic construct
  misc_feature 1..21: note = n-mer motif encoding polynucleotide
  source 1..21: mol_type = other DNA
acgcagaatcatcagttgtct

SEQ ID NO: 2594 - DNA, 21 bp, synthetic construct
  misc_feature 1..21: note = n-mer motif encoding polynucleotide
  source 1..21: mol_type = other DNA
tttgttgataataggcagcct

SEQ ID NO: 2595 - DNA, 21 bp, synthetic construct
  source 1..21: mol_type = other DNA
  misc_feature 1..21: note = n-mer motif encoding polynucleotide
agtttgaattcttcgagtact

SEQ ID NO: 2596 - DNA, 21 bp, synthetic construct
  source 1..21: mol_type = other DNA
  misc_feature 1..21: note = n-mer motif encoding polynucleotide
aaggcggtttcggagattatt

SEQ ID NO: 2597 - DNA, 21 bp, synthetic construct
  source 1..21: mol_type = other DNA
  misc_feature 1..21: note = n-mer motif encoding polynucleotide
ggtacgagtgataattatagg

SEQ ID NO: 2598 - DNA, 21 bp, synthetic construct
  source 1..21: mol_type = other DNA
  misc_feature 1..21: note = n-mer motif encoding polynucleotide
atgtctagccacaccgtccaa

SEQ ID NO: 2599 - DNA, 21 bp, synthetic construct
  misc_feature 1..21: note = n-mer motif encoding polynucleotide
  source 1..21: mol_type = other DNA
agtatcacccacagcaacacc

SEQ ID NO: 2600 - DNA, 21 bp, synthetic construct
  misc_feature 1..21: note = n-mer motif encoding polynucleotide
  source 1..21: mol_type = other DNA
gttcagactagtactggtgct

SEQ ID NO: 2601 - DNA, 21 bp, synthetic construct
  source 1..21: mol_type = other DNA
  misc_feature 1..21: note = n-mer motif encoding polynucleotide
cgtggtgatatgactcgtgcg

SEQ ID NO: 2602 - DNA, 21 bp, synthetic construct
  source 1..21: mol_type = other DNA
  misc_feature 1..21: note = n-mer motif encoding polynucleotide
attggtctgcagaattctact

SEQ ID NO: 2603 - DNA, 21 bp, synthetic construct
  misc_feature 1..21: note = n-mer motif encoding polynucleotide
  source 1..21: mol_type = other DNA
agtgcggatcgtgataataag

SEQ ID NO: 2604 - DNA, 21 bp, synthetic construct
  source 1..21: mol_type = other DNA
  misc_feature 1..21: note = n-mer motif encoding polynucleotide
tactctcaatccataaaaaac

SEQ ID NO: 2605 - DNA, 21 bp, synthetic construct
  misc_feature 1..21: note = n-mer motif encoding polynucleotide
  source 1..21: mol_type = other DNA
cgctcgttggacagcgggatg

SEQ ID NO: 2606 - DNA, 21 bp, synthetic construct
  misc_feature 1..21: note = n-mer motif encoding polynucleotide
  source 1..21: mol_type = other DNA
gctgtgcctcagtctctgcct

SEQ ID NO: 2607 - DNA, 21 bp, synthetic construct
  source 1..21: mol_type = other DNA
  misc_feature 1..21: note = n-mer motif encoding polynucleotide
gcgaatgatagtattaagctg

SEQ ID NO: 2608 - DNA, 21 bp, synthetic construct
  misc_feature 1..21: note = n-mer motif encoding polynucleotide
  source 1..21: mol_type = other DNA
aatggtaatatttatccgtct

SEQ ID NO: 2609 - DNA, 21 bp, synthetic construct
  source 1..21: mol_type = other DNA
  misc_feature 1..21: note = n-mer motif encoding polynucleotide
gggcaaacaaacgcagtacac

SEQ ID NO: 2610 - DNA, 21 bp, synthetic construct
  misc_feature 1..21: note = n-mer motif encoding polynucleotide
  source 1..21: mol_type = other DNA
caaggagacctacgtggctcg

SEQ ID NO: 2611 - DNA, 21 bp, synthetic construct
  misc_feature 1..21: note = n-mer motif encoding polynucleotide
  source 1..21: mol_type = other DNA
gttaaggcgagtgctggggtt

SEQ ID NO: 2612 - DNA, 21 bp, synthetic construct
  misc_feature 1..21: note = n-mer motif encoding polynucleotide
  source 1..21: mol_type = other DNA
atcgcgtcaacgtggaacatg

SEQ ID NO: 2613 - DNA, 21 bp, synthetic construct
  misc_feature 1..21: note = n-mer motif encoding polynucleotide
  source 1..21: mol_type = other DNA
aactcggctgaatcctcgaga

SEQ ID NO: 2614 - DNA, 21 bp, synthetic construct
  misc_feature 1..21: note = n-mer motif encoding polynucleotide
  source 1..21: mol_type = other DNA
gtcttcacgggccaaactgaa

SEQ ID NO: 2615 - DNA, 21 bp, synthetic construct
  misc_feature 1..21: note = n-mer motif encoding polynucleotide
  source 1..21: mol_type = other DNA
tttggtacttcttatacgact

SEQ ID NO: 2616 - DNA, 21 bp, synthetic construct
  source 1..21: mol_type = other DNA
  misc_feature 1..21: note = n-mer motif encoding polynucleotide
gcggttaatgagactaggctt

SEQ ID NO: 2617 - DNA, 21 bp, synthetic construct
  misc_feature 1..21: note = n-mer motif encoding polynucleotide
  source 1..21: mol_type = other DNA
ggtcggacggatactcctaat

SEQ ID NO: 2618 - DNA, 21 bp, synthetic construct
  source 1..21: mol_type = other DNA
  misc_feature 1..21: note = n-mer motif encoding polynucleotide
aacgaccgaccgcttgccagc

SEQ ID NO: 2619 - DNA, 21 bp, synthetic construct
  misc_feature 1..21: note = n-mer motif encoding polynucleotide
  source 1..21: mol_type = other DNA
gcttatcagctgactccggct

SEQ ID NO: 2620 - DNA, 21 bp, synthetic construct
  source 1..21: mol_type = other DNA
  misc_feature 1..21: note = n-mer motif encoding polynucleotide
atgggtgagatgggtaatatt

SEQ ID NO: 2621 - DNA, 21 bp, synthetic construct
  misc_feature 1..21: note = n-mer motif encoding polynucleotide
  source 1..21: mol_type = other DNA
gcggacatgcaacacaccgta

SEQ ID NO: 2622 - DNA, 21 bp, synthetic construct
  source 1..21: mol_type = other DNA
  misc_feature 1..21: note = n-mer motif encoding polynucleotide
gcggttgttctgaatagtaat

SEQ ID NO: 2623 - DNA, 21 bp, synthetic construct
  source 1..21: mol_type = other DNA
  misc_feature 1..21: note = n-mer motif encoding polynucleotide
tttcgtgatggtcagggtatg

SEQ ID NO: 2624 - DNA, 21 bp, synthetic construct
  source 1..21: mol_type = other DNA
  misc_feature 1..21: note = n-mer motif encoding polynucleotide
aaatcgacatcaaacatcgaa

SEQ ID NO: 2625 - DNA, 21 bp, synthetic construct
  source 1..21: mol_type = other DNA
  misc_feature 1..21: note = n-mer motif encoding polynucleotide
acccaagccttctccctaggc

SEQ ID NO: 2626 - DNA, 21 bp, synthetic construct
  misc_feature 1..21: note = n-mer motif encoding polynucleotide
  source 1..21: mol_type = other DNA
tggtcgagaactggaaacacc

SEQ ID NO: 2627 - DNA, 21 bp, synthetic construct
  misc_feature 1..21: note = n-mer motif encoding polynucleotide
  source 1..21: mol_type = other DNA
agcacaaacaccgaacctagg

SEQ ID NO: 2628 - DNA, 21 bp, synthetic construct
  misc_feature 1..21: note = n-mer motif encoding polynucleotide
  source 1..21: mol_type = other DNA
gagaatagtgatttgtcttat

SEQ ID NO: 2629 - DNA, 21 bp, synthetic construct
  misc_feature 1..21: note = n-mer motif encoding polynucleotide
  source 1..21: mol_type = other DNA
atagacgaacgttcctcgata

SEQ ID NO: 2630 - DNA, 21 bp, synthetic construct
  misc_feature 1..21: note = n-mer motif encoding polynucleotide
  source 1..21: mol_type = other DNA
gatgtgcattcgagtattcct

SEQ ID NO: 2631 - DNA, 21 bp, synthetic construct
  misc_feature 1..21: note = n-mer motif encoding polynucleotide
  source 1..21: mol_type = other DNA
ataagcggttccactacacac

SEQ ID NO: 2632 - DNA, 21 bp, synthetic construct
  misc_feature 1..21: note = n-mer motif encoding polynucleotide
  source 1..21: mol_type = other DNA
tggcaaacccaagtcactaca

SEQ ID NO: 2633 - DNA, 21 bp, synthetic construct
  misc_feature 1..21: note = n-mer motif encoding polynucleotide
  source 1..21: mol_type = other DNA
aacatgggtccaatgggccgg

SEQ ID NO: 2634 - DNA, 21 bp, synthetic construct
  misc_feature 1..21: note = n-mer motif encoding polynucleotide
  source 1..21: mol_type = other DNA
gttacccaatcgtccacgcta

SEQ ID NO: 2635 - DNA, 21 bp, synthetic construct
  misc_feature 1..21: note = n-mer motif encoding polynucleotide
  source 1..21: mol_type = other DNA
attgatcgtagtgctagtttg

SEQ ID NO: 2636 - DNA, 21 bp, synthetic construct
  source 1..21: mol_type = other DNA
  misc_feature 1..21: note = n-mer motif encoding polynucleotide
tctcatagtattacgggtctt

SEQ ID NO: 2637 - DNA, 21 bp, synthetic construct
  source 1..21: mol_type = other DNA
  misc_feature 1..21: note = n-mer motif encoding polynucleotide
aaagcgggacaactagtggaa

SEQ ID NO: 2638 - DNA, 21 bp, synthetic construct
  misc_feature 1..21: note = n-mer motif encoding polynucleotide
  source 1..21: mol_type = other DNA
agcggtgtatcagaaggaaac

SEQ ID NO: 2639 - DNA, 21 bp, synthetic construct
  source 1..21: mol_type = other DNA
  misc_feature 1..21: note = n-mer motif encoding polynucleotide
acgcttacattatctaccctc

SEQ ID NO: 2640 - DNA, 21 bp, synthetic construct
  misc_feature 1..21: note = n-mer motif encoding polynucleotide
  source 1..21: mol_type = other DNA
gcccacaacaaacacgaaagt

SEQ ID NO: 2641 - DNA, 21 bp, synthetic construct
  source 1..21: mol_type = other DNA
  misc_feature 1..21: note = n-mer motif encoding polynucleotide
cacaacaacaacctgcaaaac

SEQ ID NO: 2642 - DNA, 21 bp, synthetic construct
  source 1..21: mol_type = other DNA
  misc_feature 1..21: note = n-mer motif encoding polynucleotide
tataatgagtcttcgaatgcg

SEQ ID NO: 2643 - DNA, 21 bp, synthetic construct
  source 1..21: mol_type = other DNA
  misc_feature 1..21: note = n-mer motif encoding polynucleotide
cgtgagcaggctgcggagagg

SEQ ID NO: 2644 - DNA, 21 bp, synthetic construct
  source 1..21: mol_type = other DNA
  misc_feature 1..21: note = n-mer motif encoding polynucleotide
actcagtatggtactctgccg

SEQ ID NO: 2645 - DNA, 21 bp, synthetic construct
  misc_feature 1..21: note = n-mer motif encoding polynucleotide
  source 1..21: mol_type = other DNA
catcctgggaatagttctgtg

SEQ ID NO: 2646 - DNA, 21 bp, synthetic construct
  source 1..21: mol_type = other DNA
  misc_feature 1..21: note = n-mer motif encoding polynucleotide
agttctagggaggtgagtccg

SEQ ID NO: 2647 - DNA, 21 bp, synthetic construct
  source 1..21: mol_type = other DNA
  misc_feature 1..21: note = n-mer motif encoding polynucleotide
gcaaactccacaagccaatgg

SEQ ID NO: 2648 - DNA, 21 bp, synthetic construct
  source 1..21: mol_type = other DNA
  misc_feature 1..21: note = n-mer motif encoding polynucleotide
cgcgacatgatcaactcatca

SEQ ID NO: 2649 - DNA, 21 bp, synthetic construct
  source 1..21: mol_type = other DNA
  misc_feature 1..21: note = n-mer motif encoding polynucleotide
gcattgcccagcggcgcacga

SEQ ID NO: 2650 - DNA, 21 bp, synthetic construct
  source 1..21: mol_type = other DNA
  misc_feature 1..21: note = n-mer motif encoding polynucleotide
cctggcaccagtggatcccga

SEQ ID NO: 2651 - DNA, 21 bp, synthetic construct
  source 1..21: mol_type = other DNA
  misc_feature 1..21: note = n-mer motif encoding polynucleotide
tggaacggaaacgccacacaa

SEQ ID NO: 2652 - DNA, 21 bp, synthetic construct
  source 1..21: mol_type = other DNA
  misc_feature 1..21: note = n-mer motif encoding polynucleotide
ggtaaagcaaccttagtcctc

SEQ ID NO: 2653 - DNA, 21 bp, synthetic construct
  source 1..21: mol_type = other DNA
  misc_feature 1..21: note = n-mer motif encoding polynucleotide
tacaccaacgggggccaccta

SEQ ID NO: 2654 - DNA, 21 bp, synthetic construct
  misc_feature 1..21: note = n-mer motif encoding polynucleotide
  source 1..21: mol_type = other DNA
tcacaatacaacggaacgcaa

SEQ ID NO: 2655 - DNA, 21 bp, synthetic construct
  source 1..21: mol_type = other DNA
  misc_feature 1..21: note = n-mer motif encoding polynucleotide
tattctagtgagagtgcttat

SEQ ID NO: 2656 - DNA, 21 bp, synthetic construct
  source 1..21: mol_type = other DNA
  misc_feature 1..21: note = n-mer motif encoding polynucleotide
gttaaggcgggggtggctgat

SEQ ID NO: 2657 - DNA, 21 bp, synthetic construct
  misc_feature 1..21: note = n-mer motif encoding polynucleotide
  source 1..21: mol_type = other DNA
acgatggggacggtgcagatt

SEQ ID NO: 2658 - DNA, 21 bp, synthetic construct
  source 1..21: mol_type = other DNA
  misc_feature 1..21: note = n-mer motif encoding polynucleotide
ggtgtggctggtgcggtggtg

SEQ ID NO: 2659 - DNA, 21 bp, synthetic construct
  source 1..21: mol_type = other DNA
  misc_feature 1..21: note = n-mer motif encoding polynucleotide
tatgataagactttgagtgtt

SEQ ID NO: 2660 - DNA, 21 bp, synthetic construct
  source 1..21: mol_type = other DNA
  misc_feature 1..21: note = n-mer motif encoding polynucleotide
catgggagtgcgtattcgcag

SEQ ID NO: 2661 - DNA, 21 bp, synthetic construct
  misc_feature 1..21: note = n-mer motif encoding polynucleotide
  source 1..21: mol_type = other DNA
acggctaatattatgagtaag

SEQ ID NO: 2662 - DNA, 21 bp, synthetic construct
  misc_feature 1..21: note = n-mer motif encoding polynucleotide
  source 1..21: mol_type = other DNA
ttttcgcgggagacgctggcg

SEQ ID NO: 2663 - DNA, 21 bp, synthetic construct
  misc_feature 1..21: note = n-mer motif encoding polynucleotide
  source 1..21: mol_type = other DNA
ttgagtggtgctggtagtcag

SEQ ID NO: 2664 - DNA, 21 bp, synthetic construct
  misc_feature 1..21: note = n-mer motif encoding polynucleotide
  source 1..21: mol_type = other DNA
agtaatgcgaatcagatgagt

SEQ ID NO: 2665 - DNA, 21 bp, synthetic construct
  misc_feature 1..21: note = n-mer motif encoding polynucleotide
  source 1..21: mol_type = other DNA
tcggtcctttcgccttcgaac

SEQ ID NO: 2666 - DNA, 21 bp, synthetic construct
  misc_feature 1..21: note = n-mer motif encoding polynucleotide
  source 1..21: mol_type = other DNA
gataatgtgcatgggcaggtg

SEQ ID NO: 2667 - DNA, 21 bp, synthetic construct
  source 1..21: mol_type = other DNA
  misc_feature 1..21: note = n-mer motif encoding polynucleotide
gacggacgagaatacgcctcg

SEQ ID NO: 2668 - DNA, 21 bp, synthetic construct
  misc_feature 1..21: note = n-mer motif encoding polynucleotide
  source 1..21: mol_type = other DNA
atttcgaatcagattaagatg

SEQ ID NO: 2669 - DNA, 21 bp, synthetic construct
  source 1..21: mol_type = other DNA
  misc_feature 1..21: note = n-mer motif encoding polynucleotide
ggtcgagacaaccaacacgta

SEQ ID NO: 2670 - DNA, 21 bp, synthetic construct
  source 1..21: mol_type = other DNA
  misc_feature 1..21: note = n-mer motif encoding polynucleotide
cgtaatcatgagactggggct

SEQ ID NO: 2671 - DNA, 21 bp, synthetic construct
  misc_feature 1..21: note = n-mer motif encoding polynucleotide
  source 1..21: mol_type = other DNA
agtgggagtggtgcgaatatt

SEQ ID NO: 2672 - DNA, 21 bp, synthetic construct
  source 1..21: mol_type = other DNA
  misc_feature 1..21: note = n-mer motif encoding polynucleotide
tctatgtctgatgggcttcgg

SEQ ID NO: 2673 - DNA, 21 bp, synthetic construct
  misc_feature 1..21: note = n-mer motif encoding polynucleotide
  source 1..21: mol_type = other DNA
aaggagagtagtgctatggag

SEQ ID NO: 2674 - DNA, 21 bp, synthetic construct
  misc_feature 1..21: note = n-mer motif encoding polynucleotide
  source 1..21: mol_type = other DNA
gctaatgctagtactagtctg

SEQ ID NO: 2675 - DNA, 21 bp, synthetic construct
  misc_feature 1..21: note = n-mer motif encoding polynucleotide
  source 1..21: mol_type = other DNA
agtgcttctggttatttggtt

SEQ ID NO: 2676 - DNA, 21 bp, synthetic construct
  source 1..21: mol_type = other DNA
  misc_feature 1..21: note = n-mer motif encoding polynucleotide
gatactactcagaagcctcat

SEQ ID NO: 2677 - DNA, 21 bp, synthetic construct
  source 1..21: mol_type = other DNA
  misc_feature 1..21: note = n-mer motif encoding polynucleotide
ctaatacgaggttccatggaa

SEQ ID NO: 2678 - DNA, 21 bp, synthetic construct
  source 1..21: mol_type = other DNA
  misc_feature 1..21: note = n-mer motif encoding polynucleotide
gaccgcacctactcaaacaca

SEQ ID NO: 2679 - DNA, 21 bp, synthetic construct
  misc_feature 1..21: note = n-mer motif encoding polynucleotide
  source 1..21: mol_type = other DNA
gctcttgggcatcaggggaat

SEQ ID NO: 2680 - DNA, 21 bp, synthetic construct
  misc_feature 1..21: note = n-mer motif encoding polynucleotide
  source 1..21: mol_type = other DNA
gctaatcatacgtcgcaggag

SEQ ID NO: 2681 - DNA, 21 bp, synthetic construct
  source 1..21: mol_type = other DNA
  misc_feature 1..21: note = n-mer motif encoding polynucleotide
gagaggggtttgaatactaat

SEQ ID NO: 2682 - DNA, 21 bp, synthetic construct
  misc_feature 1..21: note = n-mer motif encoding polynucleotide
  source 1..21: mol_type = other DNA
actgttggtggtaatcatcat

SEQ ID NO: 2683 - DNA, 21 bp, synthetic construct
  misc_feature 1..21: note = n-mer motif encoding polynucleotide
  source 1..21: mol_type = other DNA
ccgagtgataggactacttat

SEQ ID NO: 2684 - DNA, 21 bp, synthetic construct
  misc_feature 1..21: note = n-mer motif encoding polynucleotide
  source 1..21: mol_type = other DNA
tccaggcaagaaaacttctcc

SEQ ID NO: 2685 - DNA, 21 bp, synthetic construct
  source 1..21: mol_type = other DNA
  misc_feature 1..21: note = n-mer motif encoding polynucleotide
aataagacgacgatggagttt

SEQ ID NO: 2686 - DNA, 21 bp, synthetic construct
  misc_feature 1..21: note = n-mer motif encoding polynucleotide
  source 1..21: mol_type = other DNA
aaacacacagaaaacgggacc

SEQ ID NO: 2687 - DNA, 21 bp, synthetic construct
  misc_feature 1..21: note = n-mer motif encoding polynucleotide
  source 1..21: mol_type = other DNA
gaaaccggagctatgacctct

SEQ ID NO: 2688 - DNA, 21 bp, synthetic construct
  source 1..21: mol_type = other DNA
  misc_feature 1..21: note = n-mer motif encoding polynucleotide
ggtcatagggattcgggtggt

SEQ ID NO: 2689 - DNA, 21 bp, synthetic construct
  source 1..21: mol_type = other DNA
  misc_feature 1..21: note = n-mer motif encoding polynucleotide
agaaacgccgaaggcggattg

SEQ ID NO: 2690 - DNA, 21 bp, synthetic construct
  source 1..21: mol_type = other DNA
  misc_feature 1..21: note = n-mer motif encoding polynucleotide
gggcagcgtacgacgaatgat

SEQ ID NO: 2691 - DNA, 21 bp, synthetic construct
  source 1..21: mol_type = other DNA
  misc_feature 1..21: note = n-mer motif encoding polynucleotide
tataatgatgctcttaggccg

SEQ ID NO: 2692 - DNA, 21 bp, synthetic construct
  source 1..21: mol_type = other DNA
  misc_feature 1..21: note = n-mer motif encoding polynucleotide
gggtatgcgactacggttcag

SEQ ID NO: 2693 - DNA, 21 bp, synthetic construct
  misc_feature 1..21: note = n-mer motif encoding polynucleotide
  source 1..21: mol_type = other DNA
atagggggaggcataggaaac

SEQ ID NO: 2694 - DNA, 21 bp, synthetic construct
  misc_feature 1..21: note = n-mer motif encoding polynucleotide
  source 1..21: mol_type = other DNA
gtggcggtgtctaatacgcct

SEQ ID NO: 2695 - DNA, 21 bp, synthetic construct
  misc_feature 1..21: note = n-mer motif encoding polynucleotide
  source 1..21: mol_type = other DNA
cttgcgaatggtatgacggct

SEQ ID NO: 2696 - DNA, 21 bp, synthetic construct
  source 1..21: mol_type = other DNA
  misc_feature 1..21: note = n-mer motif encoding polynucleotide
atttctgggtcgtcgtctctt

SEQ ID NO: 2697 - DNA, 21 bp, synthetic construct
  misc_feature 1..21: note = n-mer motif encoding polynucleotide
  source 1..21: mol_type = other DNA
tctaatgttcatgttgttaat

SEQ ID NO: 2698 - DNA, 21 bp, synthetic construct
  misc_feature 1..21: note = n-mer motif encoding polynucleotide
  source 1..21: mol_type = other DNA
gtggagacttcgcgtctgtat

SEQ ID NO: 2699 - DNA, 21 bp, synthetic construct
  misc_feature 1..21: note = n-mer motif encoding polynucleotide
  source 1..21: mol_type = other DNA
tcgaacgcagacatcctcgcc

SEQ ID NO: 2700 - DNA, 21 bp, synthetic construct
  misc_feature 1..21: note = n-mer motif encoding polynucleotide
  source 1..21: mol_type = other DNA
aacaacgtaaacccgtactcg

SEQ ID NO: 2701 - DNA, 21 bp, synthetic construct
  misc_feature 1..21: note = n-mer motif encoding polynucleotide
  source 1..21: mol_type = other DNA
ataagtgtaggtgtgtccgta

SEQ ID NO: 2702 - DNA, 21 bp, synthetic construct
  source 1..21: mol_type = other DNA
  misc_feature 1..21: note = n-mer motif encoding polynucleotide
tccgcaaacaacatagccccc

SEQ ID NO: 2703 - DNA, 21 bp, synthetic construct
  misc_feature 1..21: note = n-mer motif encoding polynucleotide
  source 1..21: mol_type = other DNA
ggtgttcagatgactgcgggg

SEQ ID NO: 2704 - DNA, 21 bp, synthetic construct
  misc_feature 1..21: note = n-mer motif encoding polynucleotide
  source 1..21: mol_type = other DNA
cgttacatcgccaaccaaaca

SEQ ID NO: 2705 - DNA, 21 bp, synthetic construct
  source 1..21: mol_type = other DNA
  misc_feature 1..21: note = n-mer motif encoding polynucleotide
accaccgaaagtctacacctt

SEQ ID NO: 2706 - DNA, 21 bp, synthetic construct
  source 1..21: mol_type = other DNA
  misc_feature 1..21: note = n-mer motif encoding polynucleotide
ggctaccaagacaaaacacga

SEQ ID NO: 2707 - DNA, 21 bp, synthetic construct
  misc_feature 1..21: note = n-mer motif encoding polynucleotide
  source 1..21: mol_type = other DNA
gcttcgcggcctgcggctcag

SEQ ID NO: 2708 - DNA, 21 bp, synthetic construct
  source 1..21: mol_type = other DNA
  misc_feature 1..21: note = n-mer motif encoding polynucleotide
tctattcaggagctgttgagg

SEQ ID NO: 2709 - DNA, 21 bp, synthetic construct
  source 1..21: mol_type = other DNA
  misc_feature 1..21: note = n-mer motif encoding polynucleotide
actgtgcgttcgcctcagcag

SEQ ID NO: 2710 - DNA, 21 bp, synthetic construct
  source 1..21: mol_type = other DNA
  misc_feature 1..21: note = n-mer motif encoding polynucleotide
gcggttcttggtggtagtaat

SEQ ID NO: 2711 - DNA, 21 bp, synthetic construct
  source 1..21: mol_type = other DNA
  misc_feature 1..21: note = n-mer motif encoding polynucleotide
atgagtacggttcttcgggag

SEQ ID NO: 2712 - DNA, 21 bp, synthetic construct
  misc_feature 1..21: note = n-mer motif encoding polynucleotide
  source 1..21: mol_type = other DNA
acttatggtattactcatgat

SEQ ID NO: 2713 - DNA, 21 bp, synthetic construct
  misc_feature 1..21: note = n-mer motif encoding polynucleotide
  source 1..21: mol_type = other DNA
gatgcgaatgcgggtacgagg

SEQ ID NO: 2714 - DNA, 21 bp, synthetic construct
  source 1..21: mol_type = other DNA
  misc_feature 1..21: note = n-mer motif encoding polynucleotide
ttcaacgggtacgtcatggca

SEQ ID NO: 2715 - DNA, 21 bp, synthetic construct
  source 1..21: mol_type = other DNA
  misc_feature 1..21: note = n-mer motif encoding polynucleotide
attaataattttaatactctg

SEQ ID NO: 2716 - DNA, 21 bp, synthetic construct
  source 1..21: mol_type = other DNA
  misc_feature 1..21: note = n-mer motif encoding polynucleotide
gtagccaacgaacgcctaccg

SEQ ID NO: 2717 - DNA, 21 bp, synthetic construct
  source 1..21: mol_type = other DNA
  misc_feature 1..21: note = n-mer motif encoding polynucleotide
actaattctaatcagggttcg

SEQ ID NO: 2718 - DNA, 21 bp, synthetic construct
  source 1..21: mol_type = other DNA
  misc_feature 1..21: note = n-mer motif encoding polynucleotide
gcgacgctgaataatagttat

SEQ ID NO: 2719 - DNA, 21 bp, synthetic construct
  source 1..21: mol_type = other DNA
  misc_feature 1..21: note = n-mer motif encoding polynucleotide
aaaaacgctcaaatagaccta

SEQ ID NO: 2720 - DNA, 21 bp, synthetic construct
  source 1..21: mol_type = other DNA
  misc_feature 1..21: note = n-mer motif encoding polynucleotide
cctgctacgctacacctgaca

SEQ ID NO: 2721 - DNA, 21 bp, synthetic construct
  source 1..21: mol_type = other DNA
  misc_feature 1..21: note = n-mer motif encoding polynucleotide
ttaggatcgagcacagtatcg

SEQ ID NO: 2722 - DNA, 21 bp, synthetic construct
  misc_feature 1..21: note = n-mer motif encoding polynucleotide
  source 1..21: mol_type = other DNA
aattggaattctgagggtacg

SEQ ID NO: 2723 - DNA, 21 bp, synthetic construct
  misc_feature 1..21: note = n-mer motif encoding polynucleotide
  source 1..21: mol_type = other DNA
ccaacaaacaacttaagtatg

SEQ ID NO: 2724 - DNA, 21 bp, synthetic construct
  misc_feature 1..21: note = n-mer motif encoding polynucleotide
  source 1..21: mol_type = other DNA
gcgcttaagccgaattctacg

SEQ ID NO: 2725 - DNA, 21 bp, synthetic construct
  misc_feature 1..21: note = n-mer motif encoding polynucleotide
  source 1..21: mol_type = other DNA
atggtgaattcggagaatact

SEQ ID NO: 2726 - DNA, 21 bp, synthetic construct
  misc_feature 1..21: note = n-mer motif encoding polynucleotide
  source 1..21: mol_type = other DNA
agtatggatgctcggttgacg

SEQ ID NO: 2727 - DNA, 21 bp, synthetic construct
  source 1..21: mol_type = other DNA
  misc_feature 1..21: note = n-mer motif encoding polynucleotide
aataatgttgttagggatgat

SEQ ID NO: 2728 - DNA, 21 bp, synthetic construct
  misc_feature 1..21: note = n-mer motif encoding polynucleotide
  source 1..21: mol_type = other DNA
acaagggaccaaaggtctaca

SEQ ID NO: 2729 - DNA, 21 bp, synthetic construct
  misc_feature 1..21: note = n-mer motif encoding polynucleotide
  source 1..21: mol_type = other DNA
gctgacatccggaacgacaaa

SEQ ID NO: 2730 - DNA, 21 bp, synthetic construct
  misc_feature 1..21: note = n-mer motif encoding polynucleotide
  source 1..21: mol_type = other DNA
atgcgggataagattaatccg

SEQ ID NO: 2731 - DNA, 21 bp, synthetic construct
  source 1..21: mol_type = other DNA
  misc_feature 1..21: note = n-mer motif encoding polynucleotide
ccgactcctaatgagcatatg

SEQ ID NO: 2732 - DNA, 21 bp, synthetic construct
  source 1..21: mol_type = other DNA
  misc_feature 1..21: note = n-mer motif encoding polynucleotide
ggatactcacacaactccgac

SEQ ID NO: 2733 - DNA, 21 bp, synthetic construct
  source 1..21: mol_type = other DNA
  misc_feature 1..21: note = n-mer motif encoding polynucleotide
cttcgggatgggattgcttct

SEQ ID NO: 2734 - DNA, 21 bp, synthetic construct
  source 1..21: mol_type = other DNA
  misc_feature 1..21: note = n-mer motif encoding polynucleotide
atgaaccaaatgggcggcctg

SEQ ID NO: 2735 - DNA, 21 bp, synthetic construct
  source 1..21: mol_type = other DNA
  misc_feature 1..21: note = n-mer motif encoding polynucleotide
tcttcgcctactaagggtact

SEQ ID NO: 2736 - DNA, 21 bp, synthetic construct
  misc_feature 1..21: note = n-mer motif encoding polynucleotide
  source 1..21: mol_type = other DNA
tatttggataatccgttgacg

SEQ ID NO: 2737 - DNA, 21 bp, synthetic construct
  source 1..21: mol_type = other DNA
  misc_feature 1..21: note = n-mer motif encoding polynucleotide
gtcatgcaacgatctgcacaa

SEQ ID NO: 2738 - DNA, 21 bp, synthetic construct
  source 1..21: mol_type = other DNA
  misc_feature 1..21: note = n-mer motif encoding polynucleotide
tctctgcaactcacagcgggt

SEQ ID NO: 2739 - DNA, 21 bp, synthetic construct
  source 1..21: mol_type = other DNA
  misc_feature 1..21: note = n-mer motif encoding polynucleotide
gtggggtctgggggttataat

SEQ ID NO: 2740 - DNA, 21 bp, synthetic construct
  source 1..21: mol_type = other DNA
  misc_feature 1..21: note = n-mer motif encoding polynucleotide
gatcgtccgaataatgtgtcg

SEQ ID NO: 2741 - DNA, 21 bp, synthetic construct
  source 1..21: mol_type = other DNA
  misc_feature 1..21: note = n-mer motif encoding polynucleotide
ttgactgagaaggcttctatt

SEQ ID NO: 2742 - DNA, 21 bp, synthetic construct
  source 1..21: mol_type = other DNA
  misc_feature 1..21: note = n-mer motif encoding polynucleotide
accacaaaaacgacatctatg

SEQ ID NO: 2743 - DNA, 21 bp, synthetic construct
  source 1..21: mol_type = other DNA
  misc_feature 1..21: note = n-mer motif encoding polynucleotide
cgtttggacctgcaagtccac

SEQ ID NO: 2744 - DNA, 21 bp, synthetic construct
  source 1..21: mol_type = other DNA
  misc_feature 1..21: note = n-mer motif encoding polynucleotide
actcatgtgattggggctgtg

SEQ ID NO: 2745 - DNA, 21 bp, synthetic construct
  misc_feature 1..21: note = n-mer motif encoding polynucleotide
  source 1..21: mol_type = other DNA
accctgacacacctaaaccca

SEQ ID NO: 2746 - DNA, 21 bp, synthetic construct
  misc_feature 1..21: note = n-mer motif encoding polynucleotide
  source 1..21: mol_type = other DNA
acctcaatatcgtcgcaaagc

SEQ ID NO: 2747 - DNA, 21 bp, synthetic construct
  misc_feature 1..21: note = n-mer motif encoding polynucleotide
  source 1..21: mol_type = other DNA
taccacacccaccaagtcgca

SEQ ID NO: 2748 - DNA, 21 bp, synthetic construct
  misc_feature 1..21: note = n-mer motif encoding polynucleotide
  source 1..21: mol_type = other DNA
atgcaagggcttaacaacatg

SEQ ID NO: 2749 - DNA, 21 bp, synthetic construct
  source 1..21: mol_type = other DNA
  misc_feature 1..21: note = n-mer motif encoding polynucleotide
ggtagtgcgagtaatagtggt

SEQ ID NO: 2750 - DNA, 21 bp, synthetic construct
  misc_feature 1..21: note = n-mer motif encoding polynucleotide
  source 1..21: mol_type = other DNA
gcgaatactacggggcaggtg

SEQ ID NO: 2751 - DNA, 21 bp, synthetic construct
  misc_feature 1..21: note = n-mer motif encoding polynucleotide
  source 1..21: mol_type = other DNA
agcgttgtcaacaccaacatc

SEQ ID NO: 2752 - DNA, 21 bp, synthetic construct
  source 1..21: mol_type = other DNA
  misc_feature 1..21: note = n-mer motif encoding polynucleotide
tctaataatctgaatcaggag

SEQ ID NO: 2753 - DNA, 21 bp, synthetic construct
  source 1..21: mol_type = other DNA
  misc_feature 1..21: note = n-mer motif encoding polynucleotide
atgaatgggagtgggatgcag

SEQ ID NO: 2754 - DNA, 21 bp, synthetic construct
  misc_feature 1..21: note = n-mer motif encoding polynucleotide
  source 1..21: mol_type = other DNA
ataagtcacgaccttaaatac

SEQ ID NO: 2755 - DNA, 21 bp, synthetic construct
  misc_feature 1..21: note = n-mer motif encoding polynucleotide
  source 1..21: mol_type = other DNA
acggttaatgcggatgggtcg

SEQ ID NO: 2756 - DNA, 21 bp, synthetic construct
  source 1..21: mol_type = other DNA
  misc_feature 1..21: note = n-mer motif encoding polynucleotide
aatcatattaggaatcctatg

SEQ ID NO: 2757 - DNA, 21 bp, synthetic construct
  misc_feature 1..21: note = n-mer motif encoding polynucleotide
  source 1..21: mol_type = other DNA
agtacgcgggttactctggat

SEQ ID NO: 2758 - DNA, 21 bp, synthetic construct
  source 1..21: mol_type = other DNA
  misc_feature 1..21: note = n-mer motif encoding polynucleotide
gctatgggagcactcgtgcac

SEQ ID NO: 2759 - DNA, 21 bp, synthetic construct
  misc_feature 1..21: note = n-mer motif encoding polynucleotide
  source 1..21: mol_type = other DNA
gcgcaagccatgtcaaacagc

SEQ ID NO: 2760 - DNA, 21 bp, synthetic construct
  source 1..21: mol_type = other DNA
  misc_feature 1..21: note = n-mer motif encoding polynucleotide
aatgctaatggtatgaatact

SEQ ID NO: 2761 - DNA, 21 bp, synthetic construct
  source 1..21: mol_type = other DNA
  misc_feature 1..21: note = n-mer motif encoding polynucleotide
ttgacgcttcctagtgctaat

SEQ ID NO: 2762 - DNA, 21 bp, synthetic construct
  source 1..21: mol_type = other DNA
  misc_feature 1..21: note = n-mer motif encoding polynucleotide
taccaaacgggagacaaagac

SEQ ID NO: 2763 - DNA, 21 bp, synthetic construct
  misc_feature 1..21: note = n-mer motif encoding polynucleotide
  source 1..21: mol_type = other DNA
agacgggaagaaaacgtcaac

SEQ ID NO: 2764 - DNA, 21 bp, synthetic construct
  misc_feature 1..21: note = n-mer motif encoding polynucleotide
  source 1..21: mol_type = other DNA
ggaactaccacggcagtcgcg

SEQ ID NO: 2765 - DNA, 21 bp, synthetic construct
  source 1..21: mol_type = other DNA
  misc_feature 1..21: note = n-mer motif encoding polynucleotide
acggctggtggggagcgtgcg

SEQ ID NO: 2766 - DNA, 21 bp, synthetic construct
  source 1..21: mol_type = other DNA
  misc_feature 1..21: note = n-mer motif encoding polynucleotide
gccggtaacgaacctagaccc

SEQ ID NO: 2767 - DNA, 21 bp, synthetic construct
  misc_feature 1..21: note = n-mer motif encoding polynucleotide
  source 1..21: mol_type = other DNA
gcaaacaacacagccaacagt

SEQ ID NO: 2768 - DNA, 21 bp, synthetic construct
  misc_feature 1..21: note = n-mer motif encoding polynucleotide
  source 1..21: mol_type = other DNA
catgtgaatagtagggatctt

SEQ ID NO: 2769 - DNA, 21 bp, synthetic construct
  misc_feature 1..21: note = n-mer motif encoding polynucleotide
  source 1..21: mol_type = other DNA
acataccaactttccggcaac

SEQ ID NO: 2770 - DNA, 21 bp, synthetic construct
  source 1..21: mol_type = other DNA
  misc_feature 1..21: note = n-mer motif encoding polynucleotide
cggggtgattcgatggctcgg

SEQ ID NO: 2771 - DNA, 21 bp, synthetic construct
  source 1..21: mol_type = other DNA
  misc_feature 1..21: note = n-mer motif encoding polynucleotide
ttgaataattctgcgactgtt

SEQ ID NO: 2772 - DNA, 21 bp, synthetic construct
  misc_feature 1..21: note = n-mer motif encoding polynucleotide
  source 1..21: mol_type = other DNA
ctacacgctaacaacgaacgg

SEQ ID NO: 2773 - DNA, 21 bp, synthetic construct
  misc_feature 1..21: note = n-mer motif encoding polynucleotide
  source 1..21: mol_type = other DNA
atgggttctacgactggtgtg

SEQ ID NO: 2774 - DNA, 21 bp, synthetic construct
  source 1..21: mol_type = other DNA
  misc_feature 1..21: note = n-mer motif encoding polynucleotide
gtagttgcagggcacgcaatg

SEQ ID NO: 2775 - DNA, 21 bp, synthetic construct
  misc_feature 1..21: note = n-mer motif encoding polynucleotide
  source 1..21: mol_type = other DNA
ggcaacgaaaaaccatcaggg

SEQ ID NO: 2776 - DNA, 21 bp, synthetic construct
  misc_feature 1..21: note = n-mer motif encoding polynucleotide
  source 1..21: mol_type = other DNA
cgtggtacggaggggacgccg

SEQ ID NO: 2777 - DNA, 21 bp, synthetic construct
  misc_feature 1..21: note = n-mer motif encoding polynucleotide
  source 1..21: mol_type = other DNA
tggtcccccggacccgaagcc

SEQ ID NO: 2778 - DNA, 21 bp, synthetic construct
  misc_feature 1..21: note = n-mer motif encoding polynucleotide
  source 1..21: mol_type = other DNA
attaatgtgaatcagatggcg

SEQ ID NO: 2779 - DNA, 21 bp, synthetic construct
  source 1..21: mol_type = other DNA
  misc_feature 1..21: note = n-mer motif encoding polynucleotide
cggtcggacgttatgcaaagt

SEQ ID NO: 2780 - DNA, 21 bp, synthetic construct
  misc_feature 1..21: note = n-mer motif encoding polynucleotide
  source 1..21: mol_type = other DNA
agggacgtaagtacaaaagaa

SEQ ID NO: 2781 - DNA, 21 bp, synthetic construct
  misc_feature 1..21: note = n-mer motif encoding polynucleotide
  source 1..21: mol_type = other DNA
aaaaagtcacccagacttgaa

SEQ ID NO: 2782 - DNA, 21 bp, synthetic construct
  source 1..21: mol_type = other DNA
  misc_feature 1..21: note = n-mer motif encoding polynucleotide
acgagcaacacaatgtcagac

SEQ ID NO: 2783 - DNA, 21 bp, synthetic construct
  misc_feature 1..21: note = n-mer motif encoding polynucleotide
  source 1..21: mol_type = other DNA
tctaaaggaaacgaacaaatg

SEQ ID NO: 2784 - DNA, 21 bp, synthetic construct
  misc_feature 1..21: note = n-mer motif encoding polynucleotide
  source 1..21: mol_type = other DNA
ggttacgctacgaccgtgcaa

SEQ ID NO: 2785 - DNA, 21 bp, synthetic construct
  misc_feature 1..21: note = n-mer motif encoding polynucleotide
  source 1..21: mol_type = other DNA
ggatacatgtctaacgtcata

SEQ ID NO: 2786 - DNA, 21 bp, synthetic construct
  misc_feature 1..21: note = n-mer motif encoding polynucleotide
  source 1..21: mol_type = other DNA
gtgactgttagtctggatggg

SEQ ID NO: 2787 - DNA, 21 bp, synthetic construct
  misc_feature 1..21: note = n-mer motif encoding polynucleotide
  source 1..21: mol_type = other DNA
acgaataatttgctggctcag

SEQ ID NO: 2788 - DNA, 21 bp, synthetic construct
  misc_feature 1..21: note = n-mer motif encoding polynucleotide
  source 1..21: mol_type = other DNA
gcgcagacgacggggtatacg

SEQ ID NO: 2789 - DNA, 21 bp, synthetic construct
  misc_feature 1..21: note = n-mer motif encoding polynucleotide
  source 1..21: mol_type = other DNA
agtaagtcgactgagattatg

SEQ ID NO: 2790 - DNA, 21 bp, synthetic construct
  misc_feature 1..21: note = n-mer motif encoding polynucleotide
  source 1..21: mol_type = other DNA
tctgcgatgcacacattagtc

SEQ ID NO: 2791 - DNA, 21 bp, synthetic construct
  misc_feature 1..21: note = n-mer motif encoding polynucleotide
  source 1..21: mol_type = other DNA
gctggggtgcgtgagtcgttt

SEQ ID NO: 2792 - DNA, 21 bp, synthetic construct
  misc_feature 1..21: note = n-mer motif encoding polynucleotide
  source 1..21: mol_type = other DNA
caaggcaactcaatggcgtcc

SEQ ID NO: 2793 - DNA, 21 bp, synthetic construct
  misc_feature 1..21: note = n-mer motif encoding polynucleotide
  source 1..21: mol_type = other DNA
aaaaacccgagtgtccaagaa

SEQ ID NO: 2794 - DNA, 21 bp, synthetic construct
  source 1..21: mol_type = other DNA
  misc_feature 1..21: note = n-mer motif encoding polynucleotide
cccataacacgggaatcggga

SEQ ID NO: 2795 - DNA, 21 bp, synthetic construct
  misc_feature 1..21: note = n-mer motif encoding polynucleotide
  source 1..21: mol_type = other DNA
agccgctcggcagaaatatcg

SEQ ID NO: 2796 - DNA, 21 bp, synthetic construct
  misc_feature 1..21: note = n-mer motif encoding polynucleotide
  source 1..21: mol_type = other DNA
aacgacatccccacacgagcc

SEQ ID NO: 2797 - DNA, 21 bp, synthetic construct
  source 1..21: mol_type = other DNA
  misc_feature 1..21: note = n-mer motif encoding polynucleotide
gcatacggatcgtccggaaga

SEQ ID NO: 2798 - DNA, 21 bp, synthetic construct
  misc_feature 1..21: note = n-mer motif encoding polynucleotide
  source 1..21: mol_type = other DNA
cttcatgggaattttagtcag

SEQ ID NO: 2799 - DNA, 21 bp, synthetic construct
  misc_feature 1..21: note = n-mer motif encoding polynucleotide
  source 1..21: mol_type = other DNA
gcatccaacgggcaagttaac

SEQ ID NO: 2800 - DNA, 21 bp, synthetic construct
  source 1..21: mol_type = other DNA
  misc_feature 1..21: note = n-mer motif encoding polynucleotide
cagaaggggacggttactctg

SEQ ID NO: 2801 - DNA, 21 bp, synthetic construct
  source 1..21: mol_type = other DNA
  misc_feature 1..21: note = n-mer motif encoding polynucleotide
aactctagtaacactggttgg

SEQ ID NO: 2802 - DNA, 21 bp, synthetic construct
  misc_feature 1..21: note = n-mer motif encoding polynucleotide
  source 1..21: mol_type = other DNA
acgtatcagcatcagggtccg

SEQ ID NO: 2803 - DNA, 21 bp, synthetic construct
  misc_feature 1..21: note = n-mer motif encoding polynucleotide
  source 1..21: mol_type = other DNA
gacggggtcgcacaccgctca

SEQ ID NO: 2804 - DNA, 21 bp, synthetic construct
  source 1..21: mol_type = other DNA
  misc_feature 1..21: note = n-mer motif encoding polynucleotide
gacgggctcacgctggaacgc

SEQ ID NO: 2805 - DNA, 21 bp, synthetic construct
  misc_feature 1..21: note = n-mer motif encoding polynucleotide
  source 1..21: mol_type = other DNA
aggggtgatctatctacgcct

SEQ ID NO: 2806 - DNA, 21 bp, synthetic construct
  misc_feature 1..21: note = n-mer motif encoding polynucleotide
  source 1..21: mol_type = other DNA
attaatgagattggtaggatg

SEQ ID NO: 2807 - DNA, 21 bp, synthetic construct
  misc_feature 1..21: note = n-mer motif encoding polynucleotide
  source 1..21: mol_type = other DNA
ccccaatggggaactgacccg

SEQ ID NO: 2808 - DNA, 21 bp, synthetic construct
  source 1..21: mol_type = other DNA
  misc_feature 1..21: note = n-mer motif encoding polynucleotide
aagcaggtggcgcatattgat

SEQ ID NO: 2809 - DNA, 21 bp, synthetic construct
  source 1..21: mol_type = other DNA
  misc_feature 1..21: note = n-mer motif encoding polynucleotide
aatactttgcagaatagtcat

SEQ ID NO: 2810 - DNA, 21 bp, synthetic construct
  misc_feature 1..21: note = n-mer motif encoding polynucleotide
  source 1..21: mol_type = other DNA
tggagccaagggaacacagcg

SEQ ID NO: 2811 - DNA, 21 bp, synthetic construct
  source 1..21: mol_type = other DNA
  misc_feature 1..21: note = n-mer motif encoding polynucleotide
aacgaaacgcacgtacctaaa

SEQ ID NO: 2812 - DNA, 21 bp, synthetic construct
  source 1..21: mol_type = other DNA
  misc_feature 1..21: note = n-mer motif encoding polynucleotide
gtaacgaacgaatcccgcgcc

SEQ ID NO: 2813 - DNA, 21 bp, synthetic construct
  misc_feature 1..21: note = n-mer motif encoding polynucleotide
  source 1..21: mol_type = other DNA
cccgaaggccacatgcaagac

SEQ ID NO: 2814 - DNA, 21 bp, synthetic construct
  source 1..21: mol_type = other DNA
  misc_feature 1..21: note = n-mer motif encoding polynucleotide
ttggattcgactaattctagg

SEQ ID NO: 2815 - DNA, 21 bp, synthetic construct
  misc_feature 1..21: note = n-mer motif encoding polynucleotide
  source 1..21: mol_type = other DNA
cagtcgattgggcatccggtg

SEQ ID NO: 2816 - DNA, 21 bp, synthetic construct
  misc_feature 1..21: note = n-mer motif encoding polynucleotide
  source 1..21: mol_type = other DNA
gtcctggttaacgtacacaac

SEQ ID NO: 2817 - DNA, 21 bp, synthetic construct
  source 1..21: mol_type = other DNA
  misc_feature 1..21: note = n-mer motif encoding polynucleotide
gtgcataatcctactactacg

SEQ ID NO: 2818 - DNA, 21 bp, synthetic construct
  source 1..21: mol_type = other DNA
  misc_feature 1..21: note = n-mer motif encoding polynucleotide
ggggataaggcgagtttggcg

SEQ ID NO: 2819 - DNA, 21 bp, synthetic construct
  misc_feature 1..21: note = n-mer motif encoding polynucleotide
  source 1..21: mol_type = other DNA
ctaaacgaatcccgagcgtcg

SEQ ID NO: 2820 - DNA, 21 bp, synthetic construct
  source 1..21: mol_type = other DNA
  misc_feature 1..21: note = n-mer motif encoding polynucleotide
ggttttcatattaatggtgag

SEQ ID NO: 2821 - DNA, 21 bp, synthetic construct
  misc_feature 1..21: note = n-mer motif encoding polynucleotide
  source 1..21: mol_type = other DNA
agtgttagttctgtggtgttg

SEQ ID NO: 2822 - DNA, 21 bp, synthetic construct
  misc_feature 1..21: note = n-mer motif encoding polynucleotide
  source 1..21: mol_type = other DNA
ctttcgactacttcgacgaag

SEQ ID NO: 2823 - DNA, 21 bp, synthetic construct
  source 1..21: mol_type = other DNA
  misc_feature 1..21: note = n-mer motif encoding polynucleotide
actaatacgcagaataatccg

SEQ ID NO: 2824 - DNA, 21 bp, synthetic construct
  source 1..21: mol_type = other DNA
  misc_feature 1..21: note = n-mer motif encoding polynucleotide
actaatcttgctgttacgctg

SEQ ID NO: 2825 - DNA, 21 bp, synthetic construct
  source 1..21: mol_type = other DNA
  misc_feature 1..21: note = n-mer motif encoding polynucleotide
atgtcggatcgtacttctgat

SEQ ID NO: 2826 - DNA, 21 bp, synthetic construct
  misc_feature 1..21: note = n-mer motif encoding polynucleotide
  source 1..21: mol_type = other DNA
tccgcgcaatctttcgtagtt

SEQ ID NO: 2827 - DNA, 21 bp, synthetic construct
  misc_feature 1..21: note = n-mer motif encoding polynucleotide
  source 1..21: mol_type = other DNA
atgcacacaagtagaccccca

SEQ ID NO: 2828 - DNA, 21 bp, synthetic construct
  source 1..21: mol_type = other DNA
  misc_feature 1..21: note = n-mer motif encoding polynucleotide
atgtctagccacacagtccaa

SEQ ID NO: 2829 - DNA, 21 bp, synthetic construct
  source 1..21: mol_type = other DNA
  misc_feature 1..21: note = n-mer motif encoding polynucleotide
agggatacggctaagggggtg

SEQ ID NO: 2830 - DNA, 21 bp, synthetic construct
  misc_feature 1..21: note = n-mer motif encoding polynucleotide
  source 1..21: mol_type = other DNA
gcgttaaaatccgacagcgcc

SEQ ID NO: 2831 - DNA, 21 bp, synthetic construct
  misc_feature 1..21: note = n-mer motif encoding polynucleotide
  source 1..21: mol_type = other DNA
caatacgacgccagccgacaa

SEQ ID NO: 2832 - DNA, 21 bp, synthetic construct
  source 1..21: mol_type = other DNA
  misc_feature 1..21: note = n-mer motif encoding polynucleotide
ttagccgactcaaacagcaaa

SEQ ID NO: 2833 - DNA, 21 bp, synthetic construct
  source 1..21: mol_type = other DNA
  misc_feature 1..21: note = n-mer motif encoding polynucleotide
tttcagttggctagtaatccg

SEQ ID NO: 2834 - DNA, 21 bp, synthetic construct
  misc_feature 1..21: note = n-mer motif encoding polynucleotide
  source 1..21: mol_type = other DNA
aactctgtcgtagggaacatc

SEQ ID NO: 2835 - DNA, 21 bp, synthetic construct
  misc_feature 1..21: note = n-mer motif encoding polynucleotide
  source 1..21: mol_type = other DNA
aggtatgagagtactagtgct

SEQ ID NO: 2836 - DNA, 21 bp, synthetic construct
  misc_feature 1..21: note = n-mer motif encoding polynucleotide
  source 1..21: mol_type = other DNA
gcggatcataatcatattgct

SEQ ID NO: 2837 - DNA, 21 bp, synthetic construct
  source 1..21: mol_type = other DNA
  misc_feature 1..21: note = n-mer motif encoding polynucleotide
gtaggcgaccaatcccgcccg

SEQ ID NO: 2838 - DNA, 21 bp, synthetic construct
  misc_feature 1..21: note = n-mer motif encoding polynucleotide
  source 1..21: mol_type = other DNA
ttcaacgaaactgccgggcga

SEQ ID NO: 2839 - DNA, 21 bp, synthetic construct
  misc_feature 1..21: note = n-mer motif encoding polynucleotide
  source 1..21: mol_type = other DNA
agcaactcgtacttactcaac

SEQ ID NO: 2840 - DNA, 21 bp, synthetic construct
  misc_feature 1..21: note = n-mer motif encoding polynucleotide
  source 1..21: mol_type = other DNA
cgaggcgacacaaagaactac

SEQ ID NO: 2841 - DNA, 21 bp, synthetic construct
  source 1..21: mol_type = other DNA
  misc_feature 1..21: note = n-mer motif encoding polynucleotide
acgactactactatggcatac

SEQ ID NO: 2842 - DNA, 21 bp, synthetic construct
  misc_feature 1..21: note = n-mer motif encoding polynucleotide
  source 1..21: mol_type = other DNA
cgacccccgaacgaaaacaga

SEQ ID NO: 2843 - DNA, 21 bp, synthetic construct
  misc_feature 1..21: note = n-mer motif encoding polynucleotide
  source 1..21: mol_type = other DNA
tgcgccaacatgaccaacggc

SEQ ID NO: 2844 - DNA, 21 bp, synthetic construct
  source 1..21: mol_type = other DNA
  misc_feature 1..21: note = n-mer motif encoding polynucleotide
aatcggtcggatagttttgcg

SEQ ID NO: 2845 - DNA, 21 bp, synthetic construct
  source 1..21: mol_type = other DNA
  misc_feature 1..21: note = n-mer motif encoding polynucleotide
aatcttttgacttcgtcgcct

SEQ ID NO: 2846 - DNA, 21 bp, synthetic construct
  source 1..21: mol_type = other DNA
  misc_feature 1..21: note = n-mer motif encoding polynucleotide
aactccagggaaatgggtgta

SEQ ID NO: 2847 - DNA, 21 bp, synthetic construct
  source 1..21: mol_type = other DNA
  misc_feature 1..21: note = n-mer motif encoding polynucleotide
atggggaatcagagtggtgcg

SEQ ID NO: 2848 - DNA, 21 bp, synthetic construct
  misc_feature 1..21: note = n-mer motif encoding polynucleotide
  source 1..21: mol_type = other DNA
atgctcacagaaaccaaagca

SEQ ID NO: 2849 - DNA, 21 bp, synthetic construct
  source 1..21: mol_type = other DNA
  misc_feature 1..21: note = n-mer motif encoding polynucleotide
caaaacatcaaaaacatgaca

SEQ ID NO: 2850 - DNA, 21 bp, synthetic construct
  misc_feature 1..21: note = n-mer motif encoding polynucleotide
  source 1..21: mol_type = other DNA
atgagtacggttcttcgcgag

SEQ ID NO: 2851 - DNA, 21 bp, synthetic construct
  misc_feature 1..21: note = n-mer motif encoding polynucleotide
  source 1..21: mol_type = other DNA
gaccgtgcccaaaacaacgaa

SEQ ID NO: 2852 - DNA, 21 bp, synthetic construct
  source 1..21: mol_type = other DNA
  misc_feature 1..21: note = n-mer motif encoding polynucleotide
catacgcagtcgacgggttat

SEQ ID NO: 2853 - DNA, 21 bp, synthetic construct
  misc_feature 1..21: note = n-mer motif encoding polynucleotide
  source 1..21: mol_type = other DNA
atgagtgtggggaaggtttat

SEQ ID NO: 2854 - DNA, 21 bp, synthetic construct
  source 1..21: mol_type = other DNA
  misc_feature 1..21: note = n-mer motif encoding polynucleotide
gccggaaactaccaatcatca

SEQ ID NO: 2855 - DNA, 21 bp, synthetic construct
  misc_feature 1..21: note = n-mer motif encoding polynucleotide
  source 1..21: mol_type = other DNA
agaaacgaaaacgtaaacgct

SEQ ID NO: 2856 - DNA, 21 bp, synthetic construct
  source 1..21: mol_type = other DNA
  misc_feature 1..21: note = n-mer motif encoding polynucleotide
gacacccaccacacatccagt

SEQ ID NO: 2857 - DNA, 21 bp, synthetic construct
  misc_feature 1..21: note = n-mer motif encoding polynucleotide
  source 1..21: mol_type = other DNA
actagctcccctgttctacaa

SEQ ID NO: 2858 - DNA, 21 bp, synthetic construct
  source 1..21: mol_type = other DNA
  misc_feature 1..21: note = n-mer motif encoding polynucleotide
gtgggccgtgacgcagaagct

SEQ ID NO: 2859 - DNA, 21 bp, synthetic construct
  source 1..21: mol_type = other DNA
  misc_feature 1..21: note = n-mer motif encoding polynucleotide
aacatggaaagaggatcgcaa

SEQ ID NO: 2860 - DNA, 21 bp, synthetic construct
  misc_feature 1..21: note = n-mer motif encoding polynucleotide
  source 1..21: mol_type = other DNA
gacagacaaacaggccaaaaa

SEQ ID NO: 2861 - DNA, 21 bp, synthetic construct
  misc_feature 1..21: note = n-mer motif encoding polynucleotide
  source 1..21: mol_type = other DNA
gtcttccgggaaggcatcgtg

SEQ ID NO: 2862 - DNA, 21 bp, synthetic construct
  misc_feature 1..21: note = n-mer motif encoding polynucleotide
  source 1..21: mol_type = other DNA
tccgcaaacaacatagccacc

SEQ ID NO: 2863 - DNA, 21 bp, synthetic construct
  misc_feature 1..21: note = n-mer motif encoding polynucleotide
  source 1..21: mol_type = other DNA
gtatcagaaggacaacgaatc

SEQ ID NO: 2864 - DNA, 21 bp, synthetic construct
  source 1..21: mol_type = other DNA
  misc_feature 1..21: note = n-mer motif encoding polynucleotide
cactacggtaacaaagacata

SEQ ID NO: 2865 - DNA, 21 bp, synthetic construct
  source 1..21: mol_type = other DNA
  misc_feature 1..21: note = n-mer motif encoding polynucleotide
gatgttttgcttaagaatttt

SEQ ID NO: 2866 - DNA, 21 bp, synthetic construct
  source 1..21: mol_type = other DNA
  misc_feature 1..21: note = n-mer motif encoding polynucleotide
cacacggttcaaatacgcgaa

SEQ ID NO: 2867 - DNA, 21 bp, synthetic construct
  misc_feature 1..21: note = n-mer motif encoding polynucleotide
  source 1..21: mol_type = other DNA
acatcagcactagcacaccaa

SEQ ID NO: 2868 - DNA, 21 bp, synthetic construct
  misc_feature 1..21: note = n-mer motif encoding polynucleotide
  source 1..21: mol_type = other DNA
atcccaaccggccaaactagc

SEQ ID NO: 2869 - DNA, 21 bp, synthetic construct
  source 1..21: mol_type = other DNA
  misc_feature 1..21: note = n-mer motif encoding polynucleotide
cgcagcgacaaaggaacgttg

SEQ ID NO: 2870 - DNA, 21 bp, synthetic construct
  source 1..21: mol_type = other DNA
  misc_feature 1..21: note = n-mer motif encoding polynucleotide
aatggtcttacggttcagcgg

SEQ ID NO: 2871 - DNA, 21 bp, synthetic construct
  misc_feature 1..21: note = n-mer motif encoding polynucleotide
  source 1..21: mol_type = other DNA
acggttgagggttcttatccg

SEQ ID NO: 2872 - DNA, 21 bp, synthetic construct
  source 1..21: mol_type = other DNA
  misc_feature 1..21: note = n-mer motif encoding polynucleotide
actagccacttagtacttgca

SEQ ID NO: 2873 - DNA, 21 bp, synthetic construct
  source 1..21: mol_type = other DNA
  misc_feature 1..21: note = n-mer motif encoding polynucleotide
aatcatagtctgtcggagcat

SEQ ID NO: 2874 - DNA, 21 bp, synthetic construct
  misc_feature 1..21: note = n-mer motif encoding polynucleotide
  source 1..21: mol_type = other DNA
ttaacaggcatgaacagagac

SEQ ID NO: 2875 - DNA, 21 bp, synthetic construct
  source 1..21: mol_type = other DNA
  misc_feature 1..21: note = n-mer motif encoding polynucleotide
agtcacaacgctggggtcgcc

SEQ ID NO: 2876 - DNA, 21 bp, synthetic construct
  source 1..21: mol_type = other DNA
  misc_feature 1..21: note = n-mer motif encoding polynucleotide
gcgcaccaaaccgccgggcca

SEQ ID NO: 2877 - DNA, 21 bp, synthetic construct
  source 1..21: mol_type = other DNA
  misc_feature 1..21: note = n-mer motif encoding polynucleotide
aattctcatgatttgaagtat

SEQ ID NO: 2878 - DNA, 21 bp, synthetic construct
  misc_feature 1..21: note = n-mer motif encoding polynucleotide
  source 1..21: mol_type = other DNA
actacaatgagtaccggtcaa

SEQ ID NO: 2879 - DNA, 21 bp, synthetic construct
  source 1..21: mol_type = other DNA
  misc_feature 1..21: note = n-mer motif encoding polynucleotide
gggttcgggcacgtgcccgaa

SEQ ID NO: 2880 - DNA, 21 bp, synthetic construct
  source 1..21: mol_type = other DNA
  misc_feature 1..21: note = n-mer motif encoding polynucleotide
atcaccgccgcgtcaccgcaa

SEQ ID NO: 2881 - DNA, 21 bp, synthetic construct
  source 1..21: mol_type = other DNA
  misc_feature 1..21: note = n-mer motif encoding polynucleotide
gttaaggcgagtgctggggat

SEQ ID NO: 2882 - DNA, 21 bp, synthetic construct
  source 1..21: mol_type = other DNA
  misc_feature 1..21: note = n-mer motif encoding polynucleotide
agtatcacacacagcaacacc

SEQ ID NO: 2883 - DNA, 21 bp, synthetic construct
  misc_feature 1..21: note = n-mer motif encoding polynucleotide
  source 1..21: mol_type = other DNA
cataataataatatgctgaat

SEQ ID NO: 2884 - DNA, 21 bp, synthetic construct
  source 1..21: mol_type = other DNA
  misc_feature 1..21: note = n-mer motif encoding polynucleotide
cccaaaactctaacttcgaca

SEQ ID NO: 2885 - DNA, 21 bp, synthetic construct
  misc_feature 1..21: note = n-mer motif encoding polynucleotide
  source 1..21: mol_type = other DNA
ataaccggcaacaccgtcgga

SEQ ID NO: 2886 - DNA, 21 bp, synthetic construct
  source 1..21: mol_type = other DNA
  misc_feature 1..21: note = n-mer motif encoding polynucleotide
ctcggaaaccactacacaccc

SEQ ID NO: 2887 - DNA, 21 bp, synthetic construct
  source 1..21: mol_type = other DNA
  misc_feature 1..21: note = n-mer motif encoding polynucleotide
tcgtttactaatacgaatcct

SEQ ID NO: 2888 - DNA, 21 bp, synthetic construct
  misc_feature 1..21: note = n-mer motif encoding polynucleotide
  source 1..21: mol_type = other DNA
acgttggatcggaatcagact

SEQ ID NO: 2889 - DNA, 21 bp, synthetic construct
  source 1..21: mol_type = other DNA
  misc_feature 1..21: note = n-mer motif encoding polynucleotide
atctctacgcaaagaccgcac

SEQ ID NO: 2890 - DNA, 21 bp, synthetic construct
  source 1..21: mol_type = other DNA
  misc_feature 1..21: note = n-mer motif encoding polynucleotide
acattcactactctgggcaaa

SEQ ID NO: 2891 - DNA, 21 bp, synthetic construct
  misc_feature 1..21: note = n-mer motif encoding polynucleotide
  source 1..21: mol_type = other DNA
gagaagccttctcttgtgatg

SEQ ID NO: 2892 - DNA, 21 bp, synthetic construct
  source 1..21: mol_type = other DNA
  misc_feature 1..21: note = n-mer motif encoding polynucleotide
cacatcgaaaccaacacttcg

SEQ ID NO: 2893 - DNA, 21 bp, synthetic construct
  source 1..21: mol_type = other DNA
  misc_feature 1..21: note = n-mer motif encoding polynucleotide
ggtacgaaggatattctgatt

SEQ ID NO: 2894 - DNA, 21 bp, synthetic construct
  source 1..21: mol_type = other DNA
  misc_feature 1..21: note = n-mer motif encoding polynucleotide
gcgacttttagtcatgctggt

SEQ ID NO: 2895 - DNA, 21 bp, synthetic construct
  misc_feature 1..21: note = n-mer motif encoding polynucleotide
  source 1..21: mol_type = other DNA
gccaacggcatattccaaccg

SEQ ID NO: 2896 - DNA, 21 bp, synthetic construct
  source 1..21: mol_type = other DNA
  misc_feature 1..21: note = n-mer motif encoding polynucleotide
cttaatgtgaatacgcttaat

SEQ ID NO: 2897 - DNA, 21 bp, synthetic construct
  misc_feature 1..21: note = n-mer motif encoding polynucleotide
  source 1..21: mol_type = other DNA
acttctgctagtgagaattgg

SEQ ID NO: 2898 - DNA, 21 bp, synthetic construct
  source 1..21: mol_type = other DNA
  misc_feature 1..21: note = n-mer motif encoding polynucleotide
cttcttcagggtgcgactaag

SEQ ID NO: 2899 - DNA, 21 bp, synthetic construct
  misc_feature 1..21: note = n-mer motif encoding polynucleotide
  source 1..21: mol_type = other DNA
gctcttgagactactcgtgct

SEQ ID NO: 2900 - DNA, 21 bp, synthetic construct
  misc_feature 1..21: note = n-mer motif encoding polynucleotide
  source 1..21: mol_type = other DNA
ttaacgggacaaaacgaattc

SEQ ID NO: 2901 - DNA, 21 bp, synthetic construct
  misc_feature 1..21: note = n-mer motif encoding polynucleotide
  source 1..21: mol_type = other DNA
atttctcatgatttgaagaat

SEQ ID NO: 2902 - DNA, 21 bp, synthetic construct
  misc_feature 1..21: note = n-mer motif encoding polynucleotide
  source 1..21: mol_type = other DNA
gcacaatacaacaacggcgta

SEQ ID NO: 2903 - DNA, 21 bp, synthetic construct
  source 1..21: mol_type = other DNA
  misc_feature 1..21: note = n-mer motif encoding polynucleotide
acgacgtctgtggagaagact

SEQ ID NO: 2904 - DNA, 21 bp, synthetic construct
  source 1..21: mol_type = other DNA
  misc_feature 1..21: note = n-mer motif encoding polynucleotide
ggtacgtcggctattatgcct

SEQ ID NO: 2905 - DNA, 21 bp, synthetic construct
  misc_feature 1..21: note = n-mer motif encoding polynucleotide
  source 1..21: mol_type = other DNA
cagctgcaggggactgaggcg

SEQ ID NO: 2906 - DNA, 21 bp, synthetic construct
  source 1..21: mol_type = other DNA
  misc_feature 1..21: note = n-mer motif encoding polynucleotide
gccttaaaatcccaagaacca

SEQ ID NO: 2907 - DNA, 21 bp, synthetic construct
  misc_feature 1..21: note = n-mer motif encoding polynucleotide
  source 1..21: mol_type = other DNA
tctaacagcagtgttgcggta

SEQ ID NO: 2908 - DNA, 21 bp, synthetic construct
  misc_feature 1..21: note = n-mer motif encoding polynucleotide
  source 1..21: mol_type = other DNA
aatcatggtcgtgctattgat

SEQ ID NO: 2909 - DNA, 21 bp, synthetic construct
  source 1..21: mol_type = other DNA
  misc_feature 1..21: note = n-mer motif encoding polynucleotide
gatacgtataatagtaatact

SEQ ID NO: 2910 - DNA, 21 bp, synthetic construct
  source 1..21: mol_type = other DNA
  misc_feature 1..21: note = n-mer motif encoding polynucleotide
acattccaccaagcggtcaaa

SEQ ID NO: 2911 - DNA, 21 bp, synthetic construct
  misc_feature 1..21: note = n-mer motif encoding polynucleotide
  source 1..21: mol_type = other DNA
tggcatactggtgtgtttcag

SEQ ID NO: 2912 - DNA, 21 bp, synthetic construct
  source 1..21: mol_type = other DNA
  misc_feature 1..21: note = n-mer motif encoding polynucleotide
aggggtgatctttctacgcca

SEQ ID NO: 2913 - DNA, 21 bp, synthetic construct
  source 1..21: mol_type = other DNA
  misc_feature 1..21: note = n-mer motif encoding polynucleotide
atgcttagtcaggttctgacg

SEQ ID NO: 2914 - DNA, 21 bp, synthetic construct
  source 1..21: mol_type = other DNA
  misc_feature 1..21: note = n-mer motif encoding polynucleotide
gaaaacgaaaaacgagaaagc

SEQ ID NO: 2915 - DNA, 21 bp, synthetic construct
  source 1..21: mol_type = other DNA
  misc_feature 1..21: note = n-mer motif encoding polynucleotide
atttcgagttatgatggtaat

SEQ ID NO: 2916 - DNA, 21 bp, synthetic construct
  misc_feature 1..21: note = n-mer motif encoding polynucleotide
  source 1..21: mol_type = other DNA
actcgtggcgacatggaattc

SEQ ID NO: 2917 - DNA, 21 bp, synthetic construct
  misc_feature 1..21: note = n-mer motif encoding polynucleotide
  source 1..21: mol_type = other DNA
aatgtgcagaatgtgcctggg

SEQ ID NO: 2918 - DNA, 21 bp, synthetic construct
  misc_feature 1..21: note = n-mer motif encoding polynucleotide
  source 1..21: mol_type = other DNA
tctttcacgaacacaaaccca

SEQ ID NO: 2919 - DNA, 21 bp, synthetic construct
  source 1..21: mol_type = other DNA
  misc_feature 1..21: note = n-mer motif encoding polynucleotide
tcgaacgctggctaccactcg

SEQ ID NO: 2920 - DNA, 21 bp, synthetic construct
  misc_feature 1..21: note = n-mer motif encoding polynucleotide
  source 1..21: mol_type = other DNA
gactacaaaaacagcgcgcca

SEQ ID NO: 2921 - DNA, 21 bp, synthetic construct
  misc_feature 1..21: note = n-mer motif encoding polynucleotide
  source 1..21: mol_type = other DNA
gtcgggaaaaactcgtacgaa

SEQ ID NO: 2922 - DNA, 21 bp, synthetic construct
  misc_feature 1..21: note = n-mer motif encoding polynucleotide
  source 1..21: mol_type = other DNA
gcttacgcaggtgtacttggg

SEQ ID NO: 2923 - DNA, 21 bp, synthetic construct
  source 1..21: mol_type = other DNA
  misc_feature 1..21: note = n-mer motif encoding polynucleotide
acgacgtctgagcgtgtgaat

SEQ ID NO: 2924 - DNA, 21 bp, synthetic construct
  source 1..21: mol_type = other DNA
  misc_feature 1..21: note = n-mer motif encoding polynucleotide
gacaccggaatcaaaaacgtt

SEQ ID NO: 2925 - DNA, 21 bp, synthetic construct
  source 1..21: mol_type = other DNA
  misc_feature 1..21: note = n-mer motif encoding polynucleotide
tcgaccagctctctggttccc

SEQ ID NO: 2926 - DNA, 21 bp, synthetic construct
  source 1..21: mol_type = other DNA
  misc_feature 1..21: note = n-mer motif encoding polynucleotide
tggagcgccggcgaacgggtg

SEQ ID NO: 2927 - DNA, 21 bp, synthetic construct
  source 1..21: mol_type = other DNA
  misc_feature 1..21: note = n-mer motif encoding polynucleotide
agttcggggagtttgattact

SEQ ID NO: 2928 - DNA, 21 bp, synthetic construct
  source 1..21: mol_type = other DNA
  misc_feature 1..21: note = n-mer motif encoding polynucleotide
tggatttctactgagatgagg

SEQ ID NO: 2929 - DNA, 21 bp, synthetic construct
  misc_feature 1..21: note = n-mer motif encoding polynucleotide
  source 1..21: mol_type = other DNA
tttgcggctggggcgcatggt

SEQ ID NO: 2930 - DNA, 21 bp, synthetic construct
  misc_feature 1..21: note = n-mer motif encoding polynucleotide
  source 1..21: mol_type = other DNA
ataggcgaccgcgaccaacgt

SEQ ID NO: 2931 - DNA, 21 bp, synthetic construct
  source 1..21: mol_type = other DNA
  misc_feature 1..21: note = n-mer motif encoding polynucleotide
agtacgattggtaattctact

SEQ ID NO: 2932 - DNA, 21 bp, synthetic construct
  misc_feature 1..21: note = n-mer motif encoding polynucleotide
  source 1..21: mol_type = other DNA
ggaagtggcaccgtcggtcga

SEQ ID NO: 2933 - DNA, 21 bp, synthetic construct
  misc_feature 1..21: note = n-mer motif encoding polynucleotide
  source 1..21: mol_type = other DNA
catgttacggcggtggttgat

SEQ ID NO: 2934 - DNA, 21 bp, synthetic construct
  source 1..21: mol_type = other DNA
  misc_feature 1..21: note = n-mer motif encoding polynucleotide
gataaggcgggggtggctaat

SEQ ID NO: 2935 - DNA, 21 bp, synthetic construct
  misc_feature 1..21: note = n-mer motif encoding polynucleotide
  source 1..21: mol_type = other DNA
cgtctgactgatactatgcat

SEQ ID NO: 2936 - DNA, 21 bp, synthetic construct
  misc_feature 1..21: note = n-mer motif encoding polynucleotide
  source 1..21: mol_type = other DNA
ctgaacactctaatccacaaa

SEQ ID NO: 2937 - DNA, 21 bp, synthetic construct
  misc_feature 1..21: note = n-mer motif encoding polynucleotide
  source 1..21: mol_type = other DNA
agttatcagaatcctccgcct

SEQ ID NO: 2938 - DNA, 21 bp, synthetic construct
  misc_feature 1..21: note = n-mer motif encoding polynucleotide
  source 1..21: mol_type = other DNA
ttgacaggattaaacgctttc

SEQ ID NO: 2939 - DNA, 21 bp, synthetic construct
  misc_feature 1..21: note = n-mer motif encoding polynucleotide
  source 1..21: mol_type = other DNA
agtcctgtgctttctccttcg

SEQ ID NO: 2940 - DNA, 21 bp, synthetic construct
  source 1..21: mol_type = other DNA
  misc_feature 1..21: note = n-mer motif encoding polynucleotide
gttcaaacacacataggagtc

SEQ ID NO: 2941 - DNA, 21 bp, synthetic construct
  misc_feature 1..21: note = n-mer motif encoding polynucleotide
  source 1..21: mol_type = other DNA
catatgtcttctgttgcgact

SEQ ID NO: 2942 - DNA, 21 bp, synthetic construct
  source 1..21: mol_type = other DNA
  misc_feature 1..21: note = n-mer motif encoding polynucleotide
ggaaaagccaacgacggttct

SEQ ID NO: 2943 - DNA, 21 bp, synthetic construct
  source 1..21: mol_type = other DNA
  misc_feature 1..21: note = n-mer motif encoding polynucleotide
agtactaacgacgaacgcaaa

SEQ ID NO: 2944 - DNA, 21 bp, synthetic construct
  source 1..21: mol_type = other DNA
  misc_feature 1..21: note = n-mer motif encoding polynucleotide
cagggggggaatagtcggttt

SEQ ID NO: 2945 - DNA, 21 bp, synthetic construct
  misc_feature 1..21: note = n-mer motif encoding polynucleotide
  source 1..21: mol_type = other DNA
cctaacaacgaaaaaaacccg

SEQ ID NO: 2946 - DNA, 21 bp, synthetic construct
  source 1..21: mol_type = other DNA
  misc_feature 1..21: note = n-mer motif encoding polynucleotide
gtggctgcgacgggtggtact

SEQ ID NO: 2947 - DNA, 21 bp, synthetic construct
  misc_feature 1..21: note = n-mer motif encoding polynucleotide
  source 1..21: mol_type = other DNA
gcgattgtggatagggggagt

SEQ ID NO: 2948 - DNA, 21 bp, synthetic construct
  source 1..21: mol_type = other DNA
  misc_feature 1..21: note = n-mer motif encoding polynucleotide
tcccaacaccacacgccactg

SEQ ID NO: 2949 - DNA, 21 bp, synthetic construct
  source 1..21: mol_type = other DNA
  misc_feature 1..21: note = n-mer motif encoding polynucleotide
ttacaaagctcgatgaacgta

SEQ ID NO: 2950 - DNA, 21 bp, synthetic construct
  source 1..21: mol_type = other DNA
  misc_feature 1..21: note = n-mer motif encoding polynucleotide
cgagaaaccaacccgtctgaa

SEQ ID NO: 2951 - DNA, 21 bp, synthetic construct
  misc_feature 1..21: note = n-mer motif encoding polynucleotide
  source 1..21: mol_type = other DNA
gggttcgggcacctgcccgaa

SEQ ID NO: 2952 - DNA, 21 bp, synthetic construct
  source 1..21: mol_type = other DNA
  misc_feature 1..21: note = n-mer motif encoding polynucleotide
cggaatgctactgtgactgtt

SEQ ID NO: 2953 - DNA, 21 bp, synthetic construct
  misc_feature 1..21: note = n-mer motif encoding polynucleotide
  source 1..21: mol_type = other DNA
gtttcaaacgcttcgggctta

SEQ ID NO: 2954 - DNA, 21 bp, synthetic construct
  misc_feature 1..21: note = n-mer motif encoding polynucleotide
  source 1..21: mol_type = other DNA
gatcgtccgaataatgagtcg

SEQ ID NO: 2955 - DNA, 21 bp, synthetic construct
  source 1..21: mol_type = other DNA
  misc_feature 1..21: note = n-mer motif encoding polynucleotide
caggttagtctggtgaagttg

SEQ ID NO: 2956 - DNA, 21 bp, synthetic construct
  source 1..21: mol_type = other DNA
  misc_feature 1..21: note = n-mer motif encoding polynucleotide
agtaatatgcgtgaggagatt

SEQ ID NO: 2957 - DNA, 21 bp, synthetic construct
  misc_feature 1..21: note = n-mer motif encoding polynucleotide
  source 1..21: mol_type = other DNA
gatattgggcgttcgaatagt

SEQ ID NO: 2958 - DNA, 21 bp, synthetic construct
  misc_feature 1..21: note = n-mer motif encoding polynucleotide
  source 1..21: mol_type = other DNA
gatcatatgaatttgaggtct

SEQ ID NO: 2959 - DNA, 21 bp, synthetic construct
  misc_feature 1..21: note = n-mer motif encoding polynucleotide
  source 1..21: mol_type = other DNA
attgagcgtagtagtgatcgt

SEQ ID NO: 2960 - DNA, 21 bp, synthetic construct
  misc_feature 1..21: note = n-mer motif encoding polynucleotide
  source 1..21: mol_type = other DNA
ttgtctcagaattttaatcct

SEQ ID NO: 2961 - DNA, 21 bp, synthetic construct
  source 1..21: mol_type = other DNA
  misc_feature 1..21: note = n-mer motif encoding polynucleotide
tattctatgggtcagcagccg

SEQ ID NO: 2962 - DNA, 21 bp, synthetic construct
  misc_feature 1..21: note = n-mer motif encoding polynucleotide
  source 1..21: mol_type = other DNA
tacacacaagggataatgaac

SEQ ID NO: 2963 - DNA, 21 bp, synthetic construct
  source 1..21: mol_type = other DNA
  misc_feature 1..21: note = n-mer motif encoding polynucleotide
atgctgtctcatggtgcgctt

SEQ ID NO: 2964 - DNA, 21 bp, synthetic construct
  source 1..21: mol_type = other DNA
  misc_feature 1..21: note = n-mer motif encoding polynucleotide
gcttataatgctcgtctgcct

SEQ ID NO: 2965 - DNA, 21 bp, synthetic construct
  source 1..21: mol_type = other DNA
  misc_feature 1..21: note = n-mer motif encoding polynucleotide
agacactactccgacaacgcc

SEQ ID NO: 2966 - DNA, 21 bp, synthetic construct
  source 1..21: mol_type = other DNA
  misc_feature 1..21: note = n-mer motif encoding polynucleotide
gcacacacagccatgacctac

SEQ ID NO: 2967 - DNA, 21 bp, synthetic construct
  source 1..21: mol_type = other DNA
  misc_feature 1..21: note = n-mer motif encoding polynucleotide
ctaacaggctctgacatgaaa

SEQ ID NO: 2968 - DNA, 21 bp, synthetic construct
  misc_feature 1..21: note = n-mer motif encoding polynucleotide
  source 1..21: mol_type = other DNA
accttacacacgaaagacttg

SEQ ID NO: 2969 - DNA, 21 bp, synthetic construct
  misc_feature 1..21: note = n-mer motif encoding polynucleotide
  source 1..21: mol_type = other DNA
tcgggtcaaaacggtacatca

SEQ ID NO: 2970 - DNA, 21 bp, synthetic construct
  misc_feature 1..21: note = n-mer motif encoding polynucleotide
  source 1..21: mol_type = other DNA
cgtggggacgtccacaccaac

SEQ ID NO: 2971 - DNA, 21 bp, synthetic construct
  source 1..21: mol_type = other DNA
  misc_feature 1..21: note = n-mer motif encoding polynucleotide
accggaacggctacactccca

SEQ ID NO: 2972 - DNA, 21 bp, synthetic construct
  misc_feature 1..21: note = n-mer motif encoding polynucleotide
  source 1..21: mol_type = other DNA
ctgggtacgctgcttagtcag

SEQ ID NO: 2973 - DNA, 21 bp, synthetic construct
  misc_feature 1..21: note = n-mer motif encoding polynucleotide
  source 1..21: mol_type = other DNA
gtcctctcctccaacctgtac

SEQ ID NO: 2974 - DNA, 21 bp, synthetic construct
  source 1..21: mol_type = other DNA
  misc_feature 1..21: note = n-mer motif encoding polynucleotide
agtttggggtcggatcgtatg

SEQ ID NO: 2975 - DNA, 21 bp, synthetic construct
  source 1..21: mol_type = other DNA
  misc_feature 1..21: note = n-mer motif encoding polynucleotide
aggggagatctttctacgcct

SEQ ID NO: 2976 - DNA, 21 bp, synthetic construct
  misc_feature 1..21: note = n-mer motif encoding polynucleotide
  source 1..21: mol_type = other DNA
aggatgtcggagagttctgat

SEQ ID NO: 2977 - DNA, 21 bp, synthetic construct
  source 1..21: mol_type = other DNA
  misc_feature 1..21: note = n-mer motif encoding polynucleotide
atgactgagaaggcttctatt

SEQ ID NO: 2978 - DNA, 21 bp, synthetic construct
  source 1..21: mol_type = other DNA
  misc_feature 1..21: note = n-mer motif encoding polynucleotide
acagaacaatcttactaacga

SEQ ID NO: 2979 - DNA, 21 bp, synthetic construct
  misc_feature 1..21: note = n-mer motif encoding polynucleotide
  source 1..21: mol_type = other DNA
gttgaatctaaatccgaacca

SEQ ID NO: 2980 - DNA, 21 bp, synthetic construct
  misc_feature 1..21: note = n-mer motif encoding polynucleotide
  source 1..21: mol_type = other DNA
atgaatcttgtgagggattcg

SEQ ID NO: 2981 - DNA, 21 bp, synthetic construct
  source 1..21: mol_type = other DNA
  misc_feature 1..21: note = n-mer motif encoding polynucleotide
caaaaccactctataacaaca

SEQ ID NO: 2982 - DNA, 21 bp, synthetic construct
  misc_feature 1..21: note = n-mer motif encoding polynucleotide
  source 1..21: mol_type = other DNA
acgctggacaacaaccacagc

SEQ ID NO: 2983 - DNA, 21 bp, synthetic construct
  misc_feature 1..21: note = n-mer motif encoding polynucleotide
  source 1..21: mol_type = other DNA
acgaagagttttaatgatctt

SEQ ID NO: 2984 - DNA, 21 bp, synthetic construct
  source 1..21: mol_type = other DNA
  misc_feature 1..21: note = n-mer motif encoding polynucleotide
gccacagaacactcagggcgc

SEQ ID NO: 2985 - DNA, 21 bp, synthetic construct
  misc_feature 1..21: note = n-mer motif encoding polynucleotide
  source 1..21: mol_type = other DNA
caagggactctcttgtctcca

SEQ ID NO: 2986 - DNA, 21 bp, synthetic construct
  source 1..21: mol_type = other DNA
  misc_feature 1..21: note = n-mer motif encoding polynucleotide
acattccaccaaggggtcaaa

SEQ ID NO: 2987 - DNA, 21 bp, synthetic construct
  misc_feature 1..21: note = n-mer motif encoding polynucleotide
  source 1..21: mol_type = other DNA
tgtcagcgggctgattgtgcg

SEQ ID NO: 2988 - DNA, 21 bp, synthetic construct
  source 1..21: mol_type = other DNA
  misc_feature 1..21: note = n-mer motif encoding polynucleotide
cggtatgatggtactcttaat

SEQ ID NO: 2989 - DNA, 21 bp, synthetic construct
  misc_feature 1..21: note = n-mer motif encoding polynucleotide
  source 1..21: mol_type = other DNA
caaggcggtacaaacaacccc

SEQ ID NO: 2990 - DNA, 21 bp, synthetic construct
  source 1..21: mol_type = other DNA
  misc_feature 1..21: note = n-mer motif encoding polynucleotide
gggggtaactaccacaccact

SEQ ID NO: 2991 - DNA, 21 bp, synthetic construct
  misc_feature 1..21: note = n-mer motif encoding polynucleotide
  source 1..21: mol_type = other DNA
ctggttgttcagagtgcgcag

SEQ ID NO: 2992 - DNA, 21 bp, synthetic construct
  misc_feature 1..21: note = n-mer motif encoding polynucleotide
  source 1..21: mol_type = other DNA
tatcctcatgagagtaagaat

SEQ ID NO: 2993 - DNA, 21 bp, synthetic construct
  misc_feature 1..21: note = n-mer motif encoding polynucleotide
  source 1..21: mol_type = other DNA
gagattgttaggcatacgcat

SEQ ID NO: 2994 - DNA, 21 bp, synthetic construct
  misc_feature 1..21: note = n-mer motif encoding polynucleotide
  source 1..21: mol_type = other DNA
gaccggacaaacaacatgagc

SEQ ID NO: 2995 - DNA, 21 bp, synthetic construct
  source 1..21: mol_type = other DNA
  misc_feature 1..21: note = n-mer motif encoding polynucleotide
tccgtaaccaacggagcggaa

SEQ ID NO: 2996 - DNA, 21 bp, synthetic construct
  misc_feature 1..21: note = n-mer motif encoding polynucleotide
  source 1..21: mol_type = other DNA
agcggacaaaaaaactcagaa

SEQ ID NO: 2997 - DNA, 21 bp, synthetic construct
  source 1..21: mol_type = other DNA
  misc_feature 1..21: note = n-mer motif encoding polynucleotide
gagcagaagaagactgatcat

SEQ ID NO: 2998 - DNA, 21 bp, synthetic construct
  source 1..21: mol_type = other DNA
  misc_feature 1..21: note = n-mer motif encoding polynucleotide
aatattaatggtggggggaat

SEQ ID NO: 2999 - DNA, 21 bp, synthetic construct
  misc_feature 1..21: note = n-mer motif encoding polynucleotide
  source 1..21: mol_type = other DNA
aagctgcatactaaggatctt

SEQ ID NO: 3000 - DNA, 21 bp, synthetic construct
  misc_feature 1..21: note = n-mer motif encoding polynucleotide
  source 1..21: mol_type = other DNA
agcttcttggtagcccaccca

SEQ ID NO: 3001 - DNA, 21 bp, synthetic construct
  source 1..21: mol_type = other DNA
  misc_feature 1..21: note = n-mer motif encoding polynucleotide
taccaacaaaacatagaaatc

SEQ ID NO: 3002 - DNA, 21 bp, synthetic construct
  misc_feature 1..21: note = n-mer motif encoding polynucleotide
  source 1..21: mol_type = other DNA
aggggtgatctttctacgact

SEQ ID NO: 3003 - DNA, 21 bp, synthetic construct
  source 1..21: mol_type = other DNA
  misc_feature 1..21: note = n-mer motif encoding polynucleotide
gcgaacctcaacttgaccagt

SEQ ID NO: 3004 - DNA, 21 bp, synthetic construct
  misc_feature 1..21: note = n-mer motif encoding polynucleotide
  source 1..21: mol_type = other DNA
acggtgcagcatgcggcgacg

SEQ ID NO: 3005 - DNA, 21 bp, synthetic construct
  source 1..21: mol_type = other DNA
  misc_feature 1..21: note = n-mer motif encoding polynucleotide
accgtaaacctcctagcggca

SEQ ID NO: 3006 - DNA, 21 bp, synthetic construct
  source 1..21: mol_type = other DNA
  misc_feature 1..21: note = n-mer motif encoding polynucleotide
aaccaaagagttgaacaaaaa

SEQ ID NO: 3007 - DNA, 21 bp, synthetic construct
  source 1..21: mol_type = other DNA
  misc_feature 1..21: note = n-mer motif encoding polynucleotide
aatacttatactgctgcgaag

SEQ ID NO: 3008 - DNA, 21 bp, synthetic construct
  source 1..21: mol_type = other DNA
  misc_feature 1..21: note = n-mer motif encoding polynucleotide
atccaaagagacgtgggccac

SEQ ID NO: 3009 - DNA, 21 bp, synthetic construct
  source 1..21: mol_type = other DNA
  misc_feature 1..21: note = n-mer motif encoding polynucleotide
atctcagaaatgactaggtac

SEQ ID NO: 3010 - DNA, 21 bp, synthetic construct
  source 1..21: mol_type = other DNA
  misc_feature 1..21: note = n-mer motif encoding polynucleotide
attgctactaatgtgatttat

SEQ ID NO: 3011 - DNA, 21 bp, synthetic construct
  source 1..21: mol_type = other DNA
  misc_feature 1..21: note = n-mer motif encoding polynucleotide
aacggcaaccactccatagac

SEQ ID NO: 3012 - DNA, 21 bp, synthetic construct
  misc_feature 1..21: note = n-mer motif encoding polynucleotide
  source 1..21: mol_type = other DNA
acgagtattggtagtgctaag

SEQ ID NO: 3013 - DNA, 21 bp, synthetic construct
  source 1..21: mol_type = other DNA
  misc_feature 1..21: note = n-mer motif encoding polynucleotide
aacgtacactctgttgacaaa

SEQ ID NO: 3014 - DNA, 21 bp, synthetic construct
  source 1..21: mol_type = other DNA
  misc_feature 1..21: note = n-mer motif encoding polynucleotide
gaactctccgttccgaaacca

SEQ ID NO: 3015 - DNA, 21 bp, synthetic construct
  source 1..21: mol_type = other DNA
  misc_feature 1..21: note = n-mer motif encoding polynucleotide
ttcctcgacaaatacaactac

SEQ ID NO: 3016 - DNA, 21 bp, synthetic construct
  misc_feature 1..21: note = n-mer motif encoding polynucleotide
  source 1..21: mol_type = other DNA
tacatcccgaacaactcagga

SEQ ID NO: 3017 - DNA, 21 bp, synthetic construct
  source 1..21: mol_type = other DNA
  misc_feature 1..21: note = n-mer motif encoding polynucleotide
gggctaggacaaccccaactc

SEQ ID NO: 3018 - DNA, 21 bp, synthetic construct
  source 1..21: mol_type = other DNA
  misc_feature 1..21: note = n-mer motif encoding polynucleotide
gaggggagtcaggggaatcat

SEQ ID NO: 3019 - DNA, 21 bp, synthetic construct
  misc_feature 1..21: note = n-mer motif encoding polynucleotide
  source 1..21: mol_type = other DNA
aatatttatatggcgagtggt

SEQ ID NO: 3020 - DNA, 21 bp, synthetic construct
  source 1..21: mol_type = other DNA
  misc_feature 1..21: note = n-mer motif encoding polynucleotide
aatttgcagactggtgttcag

SEQ ID NO: 3021 - DNA, 21 bp, synthetic construct
  misc_feature 1..21: note = n-mer motif encoding polynucleotide
  source 1..21: mol_type = other DNA
accgtcgctccctacagtagc

SEQ ID NO: 3022 - DNA, 21 bp, synthetic construct
  misc_feature 1..21: note = n-mer motif encoding polynucleotide
  source 1..21: mol_type = other DNA
tcaaactactctgacggaata

SEQ ID NO: 3023 - DNA, 21 bp, synthetic construct
  misc_feature 1..21: note = n-mer motif encoding polynucleotide
  source 1..21: mol_type = other DNA
gctacttacgttgtcggaaca

SEQ ID NO: 3024 - DNA, 21 bp, synthetic construct
  source 1..21: mol_type = other DNA
  misc_feature 1..21: note = n-mer motif encoding polynucleotide
tcaagggaagcgggttcaact

SEQ ID NO: 3025 - DNA, 21 bp, synthetic construct
  source 1..21: mol_type = other DNA
  misc_feature 1..21: note = n-mer motif encoding polynucleotide
gccggaaaaacccacgccgac

SEQ ID NO: 3026 - DNA, 21 bp, synthetic construct
  misc_feature 1..21: note = n-mer motif encoding polynucleotide
  source 1..21: mol_type = other DNA
ccgctttctcttcataatagt

SEQ ID NO: 3027 - DNA, 21 bp, synthetic construct
  source 1..21: mol_type = other DNA
  misc_feature 1..21: note = n-mer motif encoding polynucleotide
cttcgagacctaaacggagga

SEQ ID NO: 3028 - DNA, 21 bp, synthetic construct
  misc_feature 1..21: note = n-mer motif encoding polynucleotide
  source 1..21: mol_type = other DNA
gataggacgtattcgaatacg

SEQ ID NO: 3029 - DNA, 21 bp, synthetic construct
  source 1..21: mol_type = other DNA
  misc_feature 1..21: note = n-mer motif encoding polynucleotide
tcggtcaccagtggaacacaa

SEQ ID NO: 3030 - DNA, 21 bp, synthetic construct
  source 1..21: mol_type = other DNA
  misc_feature 1..21: note = n-mer motif encoding polynucleotide
aatatgacttcggcttatcat

SEQ ID NO: 3031 - DNA, 21 bp, synthetic construct
  misc_feature 1..21: note = n-mer motif encoding polynucleotide
  source 1..21: mol_type = other DNA
gttatgggtggtcctgggatt

SEQ ID NO: 3032 - DNA, 21 bp, synthetic construct
  misc_feature 1..21: note = n-mer motif encoding polynucleotide
  source 1..21: mol_type = other DNA
gctgggactcatactgataag

SEQ ID NO: 3033 - DNA, 21 bp, synthetic construct
  source 1..21: mol_type = other DNA
  misc_feature 1..21: note = n-mer motif encoding polynucleotide
ggtactatgaatattggtatt

SEQ ID NO: 3034 - DNA, 21 bp, synthetic construct
  source 1..21: mol_type = other DNA
  misc_feature 1..21: note = n-mer motif encoding polynucleotide
acagccggcggcgaacgcgcc

SEQ ID NO: 3035 - DNA, 21 bp, synthetic construct
  misc_feature 1..21: note = n-mer motif encoding polynucleotide
  source 1..21: mol_type = other DNA
ggtatgacttctaatcaggtt

SEQ ID NO: 3036 - DNA, 21 bp, synthetic construct
  source 1..21: mol_type = other DNA
  misc_feature 1..21: note = n-mer motif encoding polynucleotide
catttttcgcagattactaat

SEQ ID NO: 3037 - DNA, 21 bp, synthetic construct
  source 1..21: mol_type = other DNA
  misc_feature 1..21: note = n-mer motif encoding polynucleotide
agcaggatagaaaacaacaac

SEQ ID NO: 3038 - DNA, 21 bp, synthetic construct
  misc_feature 1..21: note = n-mer motif encoding polynucleotide
  source 1..21: mol_type = other DNA
gatacggcgagttataataat

SEQ ID NO: 3039 - DNA, 21 bp, synthetic construct
  misc_feature 1..21: note = n-mer motif encoding polynucleotide
  source 1..21: mol_type = other DNA
gtgaatcagagtcctggggct

SEQ ID NO: 3040 - DNA, 21 bp, synthetic construct
  source 1..21: mol_type = other DNA
  misc_feature 1..21: note = n-mer motif encoding polynucleotide
aataatatgggtcatggtcat

SEQ ID NO: 3041 - DNA, 21 bp, synthetic construct
  misc_feature 1..21: note = n-mer motif encoding polynucleotide
  source 1..21: mol_type = other DNA
tcgcggctatcacaagacccc

SEQ ID NO: 3042 - DNA, 21 bp, synthetic construct
  source 1..21: mol_type = other DNA
  misc_feature 1..21: note = n-mer motif encoding polynucleotide
tctacgtctcaggctgtgcag

SEQ ID NO: 3043 - DNA, 21 bp, synthetic construct
  source 1..21: mol_type = other DNA
  misc_feature 1..21: note = n-mer motif encoding polynucleotide
cgatggcaaggactgagcgcg

SEQ ID NO: 3044 - DNA, 21 bp, synthetic construct
  source 1..21: mol_type = other DNA
  misc_feature 1..21: note = n-mer motif encoding polynucleotide
gcgcatatgcattcggagttg

SEQ ID NO: 3045 - DNA, 21 bp, synthetic construct
  misc_feature 1..21: note = n-mer motif encoding polynucleotide
  source 1..21: mol_type = other DNA
aataatcttacgaattcgacg

SEQ ID NO: 3046 - DNA, 21 bp, synthetic construct
  source 1..21: mol_type = other DNA
  misc_feature 1..21: note = n-mer motif encoding polynucleotide
cagcctagtgcgagtgagctt

SEQ ID NO: 3047 - DNA, 21 bp, synthetic construct
  source 1..21: mol_type = other DNA
  misc_feature 1..21: note = n-mer motif encoding polynucleotide
gggacttccttggaaaaccga

SEQ ID NO: 3048 - DNA, 21 bp, synthetic construct
  source 1..21: mol_type = other DNA
  misc_feature 1..21: note = n-mer motif encoding polynucleotide
ctgtctaattcgattacgcct

SEQ ID NO: 3049 - DNA, 21 bp, synthetic construct
  misc_feature 1..21: note = n-mer motif encoding polynucleotide
  source 1..21: mol_type = other DNA
accatagtgtccacttcttac

SEQ ID NO: 3050 - DNA, 21 bp, synthetic construct
  source 1..21: mol_type = other DNA
  misc_feature 1..21: note = n-mer motif encoding polynucleotide
accctaggctacccagacaaa

SEQ ID NO: 3051 - DNA, 21 bp, synthetic construct
  misc_feature 1..21: note = n-mer motif encoding polynucleotide
  source 1..21: mol_type = other DNA
tcaagacacgacgtccgaaac

SEQ ID NO: 3052 - DNA, 21 bp, synthetic construct
  source 1..21: mol_type = other DNA
  misc_feature 1..21: note = n-mer motif encoding polynucleotide
aatggtagtgtggctaatcct

SEQ ID NO: 3053 - DNA, 21 bp, synthetic construct
  misc_feature 1..21: note = n-mer motif encoding polynucleotide
  source 1..21: mol_type = other DNA
gcgatggatgggtatagggtt

SEQ ID NO: 3054 - DNA, 21 bp, synthetic construct
  source 1..21: mol_type = other DNA
  misc_feature 1..21: note = n-mer motif encoding polynucleotide
tggacgggcgcacaaccttct

SEQ ID NO: 3055 - DNA, 21 bp, synthetic construct
  misc_feature 1..21: note = n-mer motif encoding polynucleotide
  source 1..21: mol_type = other DNA
aaaaacggcgccataggaaca

SEQ ID NO: 3056 - DNA, 21 bp, synthetic construct
  source 1..21: mol_type = other DNA
  misc_feature 1..21: note = n-mer motif encoding polynucleotide
gtacttccaagtcggatcgcg

SEQ ID NO: 3057 - DNA, 21 bp, synthetic construct
  source 1..21: mol_type = other DNA
  misc_feature 1..21: note = n-mer motif encoding polynucleotide
gataatgtgaattctcagcct

SEQ ID NO: 3058 - DNA, 21 bp, synthetic construct
  misc_feature 1..21: note = n-mer motif encoding polynucleotide
  source 1..21: mol_type = other DNA
ggcgtaaacgctagctacagc

SEQ ID NO: 3059 - DNA, 21 bp, synthetic construct
  misc_feature 1..21: note = n-mer motif encoding polynucleotide
  source 1..21: mol_type = other DNA
ctgtctcacgccatggaccgg

SEQ ID NO: 3060 - DNA, 21 bp, synthetic construct
  source 1..21: mol_type = other DNA
  misc_feature 1..21: note = n-mer motif encoding polynucleotide
agggctcatggggataatcag

SEQ ID NO: 3061 - DNA, 21 bp, synthetic construct
  misc_feature 1..21: note = n-mer motif encoding polynucleotide
  source 1..21: mol_type = other DNA
ttgcagacgcctgggacgacg

SEQ ID NO: 3062 - DNA, 21 bp, synthetic construct
  source 1..21: mol_type = other DNA
  misc_feature 1..21: note = n-mer motif encoding polynucleotide
actcaggttgttagtatttat

SEQ ID NO: 3063 - DNA, 21 bp, synthetic construct
  misc_feature 1..21: note = n-mer motif encoding polynucleotide
  source 1..21: mol_type = other DNA
caggttcaggggactctgggg

SEQ ID NO: 3064 - DNA, 21 bp, synthetic construct
  source 1..21: mol_type = other DNA
  misc_feature 1..21: note = n-mer motif encoding polynucleotide
gtgggcaaccaaaacttaccc

SEQ ID NO: 3065 - DNA, 21 bp, synthetic construct
  source 1..21: mol_type = other DNA
  misc_feature 1..21: note = n-mer motif encoding polynucleotide
tatgttgattatagtaagtcg

SEQ ID NO: 3066 - DNA, 21 bp, synthetic construct
  misc_feature 1..21: note = n-mer motif encoding polynucleotide
  source 1..21: mol_type = other DNA
ctgcttaattcttcgggtgtg

SEQ ID NO: 3067 - DNA, 21 bp, synthetic construct
  source 1..21: mol_type = other DNA
  misc_feature 1..21: note = n-mer motif encoding polynucleotide
aatcagtcgcttactatggat

SEQ ID NO: 3068 - DNA, 21 bp, synthetic construct
  source 1..21: mol_type = other DNA
  misc_feature 1..21: note = n-mer motif encoding polynucleotide
gctggtaaggatcttagtaat

SEQ ID NO: 3069 - DNA, 21 bp, synthetic construct
  source 1..21: mol_type = other DNA
  misc_feature 1..21: note = n-mer motif encoding polynucleotide
tcttacgttagcgtccccgcc

SEQ ID NO: 3070 - DNA, 21 bp, synthetic construct
  misc_feature 1..21: note = n-mer motif encoding polynucleotide
  source 1..21: mol_type = other DNA
aatgaggggcgtgtgcagact

SEQ ID NO: 3071 - DNA, 21 bp, synthetic construct
  misc_feature 1..21: note = n-mer motif encoding polynucleotide
  source 1..21: mol_type = other DNA
actttgacgcagactgggatg

SEQ ID NO: 3072 - DNA, 21 bp, synthetic construct
  source 1..21: mol_type = other DNA
  misc_feature 1..21: note = n-mer motif encoding polynucleotide
ggcttcgcattaactggcacc

SEQ ID NO: 3073 - DNA, 21 bp, synthetic construct
  source 1..21: mol_type = other DNA
  misc_feature 1..21: note = n-mer motif encoding polynucleotide
cagtcgacgctgaataggcct

SEQ ID NO: 3074 - DNA, 21 bp, synthetic construct
  misc_feature 1..21: note = n-mer motif encoding polynucleotide
  source 1..21: mol_type = other DNA
acaacaacacactccatctcc

SEQ ID NO: 3075 - DNA, 21 bp, synthetic construct
  source 1..21: mol_type = other DNA
  misc_feature 1..21: note = n-mer motif encoding polynucleotide
aacacacacagacaagaatac

SEQ ID NO: 3076 - DNA, 21 bp, synthetic construct
  source 1..21: mol_type = other DNA
  misc_feature 1..21: note = n-mer motif encoding polynucleotide
tcccaaatagtcaacaccaca

SEQ ID NO: 3077 - DNA, 21 bp, synthetic construct
  source 1..21: mol_type = other DNA
  misc_feature 1..21: note = n-mer motif encoding polynucleotide
ctggtgcttgagatgcagacg

SEQ ID NO: 3078 - DNA, 21 bp, synthetic construct
  misc_feature 1..21: note = n-mer motif encoding polynucleotide
  source 1..21: mol_type = other DNA
aacgacatctccacccaacgg

SEQ ID NO: 3079 - DNA, 21 bp, synthetic construct
  misc_feature 1..21: note = n-mer motif encoding polynucleotide
  source 1..21: mol_type = other DNA
tacaccgccgacaaaaaacaa

SEQ ID NO: 3080 - DNA, 21 bp, synthetic construct
  misc_feature 1..21: note = n-mer motif encoding polynucleotide
  source 1..21: mol_type = other DNA
ttcggagcaaccaccacagca

SEQ ID NO: 3081 - DNA, 21 bp, synthetic construct
  source 1..21: mol_type = other DNA
  misc_feature 1..21: note = n-mer motif encoding polynucleotide
gttcagatttctatgaataat

SEQ ID NO: 3082 - DNA, 21 bp, synthetic construct
  misc_feature 1..21: note = n-mer motif encoding polynucleotide
  source 1..21: mol_type = other DNA
atgcatgcgcaggagtctcgt

SEQ ID NO: 3083 - DNA, 21 bp, synthetic construct
  source 1..21: mol_type = other DNA
  misc_feature 1..21: note = n-mer motif encoding polynucleotide
catgtgaatactgctgatcgg

SEQ ID NO: 3084 - DNA, 21 bp, synthetic construct
  misc_feature 1..21: note = n-mer motif encoding polynucleotide
  source 1..21: mol_type = other DNA
tacagtacagactccaccaaa

SEQ ID NO: 3085 - DNA, 21 bp, synthetic construct
  misc_feature 1..21: note = n-mer motif encoding polynucleotide
  source 1..21: mol_type = other DNA
ggacacgaccgaacaccaaac

SEQ ID NO: 3086 - DNA, 21 bp, synthetic construct
  misc_feature 1..21: note = n-mer motif encoding polynucleotide
  source 1..21: mol_type = other DNA
acgagtggtgtgcttacgcgg

SEQ ID NO: 3087 - DNA, 21 bp, synthetic construct
  source 1..21: mol_type = other DNA
  misc_feature 1..21: note = n-mer motif encoding polynucleotide
aatattgctatgtctaagatt

SEQ ID NO: 3088 - DNA, 21 bp, synthetic construct
  misc_feature 1..21: note = n-mer motif encoding polynucleotide
  source 1..21: mol_type = other DNA
atggggactgagtatcgtatg

SEQ ID NO: 3089 - DNA, 21 bp, synthetic construct
  misc_feature 1..21: note = n-mer motif encoding polynucleotide
  source 1..21: mol_type = other DNA
ccttatgcgaataggcttgag

SEQ ID NO: 3090 - DNA, 21 bp, synthetic construct
  misc_feature 1..21: note = n-mer motif encoding polynucleotide
  source 1..21: mol_type = other DNA
ccgcttcagaataataagacg

SEQ ID NO: 3091 - DNA, 21 bp, synthetic construct
  source 1..21: mol_type = other DNA
  misc_feature 1..21: note = n-mer motif encoding polynucleotide
tccttgacggaaaaagcgccg

SEQ ID NO: 3092 - DNA, 21 bp, synthetic construct
  source 1..21: mol_type = other DNA
  misc_feature 1..21: note = n-mer motif encoding polynucleotide
aatatggtgtatacgaatgtg

SEQ ID NO: 3093 - DNA, 21 bp, synthetic construct
  source 1..21: mol_type = other DNA
  misc_feature 1..21: note = n-mer motif encoding polynucleotide
atgttaagtgccacccaaggg

SEQ ID NO: 3094 - DNA, 21 bp, synthetic construct
  misc_feature 1..21: note = n-mer motif encoding polynucleotide
  source 1..21: mol_type = other DNA
aacatgactcactcaaccgta

SEQ ID NO: 3095 - DNA, 21 bp, synthetic construct
  source 1..21: mol_type = other DNA
  misc_feature 1..21: note = n-mer motif encoding polynucleotide
atttatacgaatagtcatgtt

SEQ ID NO: 3096 - DNA, 21 bp, synthetic construct
  misc_feature 1..21: note = n-mer motif encoding polynucleotide
  source 1..21: mol_type = other DNA
tggtcgcatgatcggcctact

SEQ ID NO: 3097 - DNA, 21 bp, synthetic construct
  source 1..21: mol_type = other DNA
  misc_feature 1..21: note = n-mer motif encoding polynucleotide
gaaaaaggcacaccaagtagc

SEQ ID NO: 3098 - DNA, 21 bp, synthetic construct
  source 1..21: mol_type = other DNA
  misc_feature 1..21: note = n-mer motif encoding polynucleotide
catcattctactgagtcgttg

SEQ ID NO: 3099 - DNA, 21 bp, synthetic construct
  misc_feature 1..21: note = n-mer motif encoding polynucleotide
  source 1..21: mol_type = other DNA
ccaaaaagcacccaagtaatg

SEQ ID NO: 3100 - DNA, 21 bp, synthetic construct
  misc_feature 1..21: note = n-mer motif encoding polynucleotide
  source 1..21: mol_type = other DNA
agtgataggactgctcagcag

SEQ ID NO: 3101 - DNA, 21 bp, synthetic construct
  misc_feature 1..21: note = n-mer motif encoding polynucleotide
  source 1..21: mol_type = other DNA
gctaccctcgcacggacctca

SEQ ID NO: 3102 - DNA, 21 bp, synthetic construct
  source 1..21: mol_type = other DNA
  misc_feature 1..21: note = n-mer motif encoding polynucleotide
atttctcaggtgtcttttaat

SEQ ID NO: 3103 - DNA, 21 bp, synthetic construct
  source 1..21: mol_type = other DNA
  misc_feature 1..21: note = n-mer motif encoding polynucleotide
cattatgggaataaggatatt

SEQ ID NO: 3104 - DNA, 21 bp, synthetic construct
  misc_feature 1..21: note = n-mer motif encoding polynucleotide
  source 1..21: mol_type = other DNA
aatgatgggactgatcgtagg

SEQ ID NO: 3105 - DNA, 21 bp, synthetic construct
  misc_feature 1..21: note = n-mer motif encoding polynucleotide
  source 1..21: mol_type = other DNA
accaaccacataaccggtcca

SEQ ID NO: 3106 - DNA, 21 bp, synthetic construct
  source 1..21: mol_type = other DNA
  misc_feature 1..21: note = n-mer motif encoding polynucleotide
actaattctaatcagagttcg

SEQ ID NO: 3107 - DNA, 21 bp, synthetic construct
  misc_feature 1..21: note = n-mer motif encoding polynucleotide
  source 1..21: mol_type = other DNA
gtggcgactcattataatgag

SEQ ID NO: 3108 - DNA, 21 bp, synthetic construct
  source 1..21: mol_type = other DNA
  misc_feature 1..21: note = n-mer motif encoding polynucleotide
gacctcggtacggctagaacc

SEQ ID NO: 3109 - DNA, 21 bp, synthetic construct
  source 1..21: mol_type = other DNA
  misc_feature 1..21: note = n-mer motif encoding polynucleotide
gctcttagtcagagtgcgggt

SEQ ID NO: 3110 - DNA, 21 bp, synthetic construct
  source 1..21: mol_type = other DNA
  misc_feature 1..21: note = n-mer motif encoding polynucleotide
aaaaccaccctacaccaagca

SEQ ID NO: 3111 - DNA, 21 bp, synthetic construct
  source 1..21: mol_type = other DNA
  misc_feature 1..21: note = n-mer motif encoding polynucleotide
atgataaacgccataactcca

SEQ ID NO: 3112 - DNA, 21 bp, synthetic construct
  source 1..21: mol_type = other DNA
  misc_feature 1..21: note = n-mer motif encoding polynucleotide
gggtctacgccgggggcgagt

SEQ ID NO: 3113 - DNA, 21 bp, synthetic construct
  misc_feature 1..21: note = n-mer motif encoding polynucleotide
  source 1..21: mol_type = other DNA
aatgagaagccgcagtcgacg

SEQ ID NO: 3114 - DNA, 21 bp, synthetic construct
  misc_feature 1..21: note = n-mer motif encoding polynucleotide
  source 1..21: mol_type = other DNA
tcattgatgggcagtgcagga

SEQ ID NO: 3115 - DNA, 21 bp, synthetic construct
  misc_feature 1..21: note = n-mer motif encoding polynucleotide
  source 1..21: mol_type = other DNA
accgacacgctcagcgaaaga

SEQ ID NO: 3116 - DNA, 21 bp, synthetic construct
  source 1..21: mol_type = other DNA
  misc_feature 1..21: note = n-mer motif encoding polynucleotide
gcctcgcaatcagaaaaaaac

SEQ ID NO: 3117 - DNA, 21 bp, synthetic construct
  misc_feature 1..21: note = n-mer motif encoding polynucleotide
  source 1..21: mol_type = other DNA
gctgttagaacaccggcaatg

SEQ ID NO: 3118 - DNA, 21 bp, synthetic construct
  misc_feature 1..21: note = n-mer motif encoding polynucleotide
  source 1..21: mol_type = other DNA
cctaatgctagttttggtccg

SEQ ID NO: 3119 - DNA, 21 bp, synthetic construct
  misc_feature 1..21: note = n-mer motif encoding polynucleotide
  source 1..21: mol_type = other DNA
aaagcccacgttgtagaaata

SEQ ID NO: 3120 - DNA, 21 bp, synthetic construct
  misc_feature 1..21: note = n-mer motif encoding polynucleotide
  source 1..21: mol_type = other DNA
tatatttcggcgcctccgatg

SEQ ID NO: 3121 - DNA, 21 bp, synthetic construct
  misc_feature 1..21: note = n-mer motif encoding polynucleotide
  source 1..21: mol_type = other DNA
ccaatccaaaacgaatcgtcc

SEQ ID NO: 3122 - DNA, 21 bp, synthetic construct
  source 1..21: mol_type = other DNA
  misc_feature 1..21: note = n-mer motif encoding polynucleotide
ggcgtaaccaacgcttccaaa

SEQ ID NO: 3123 - DNA, 21 bp, synthetic construct
  misc_feature 1..21: note = n-mer motif encoding polynucleotide
  source 1..21: mol_type = other DNA
gtaaacgggggaaaaccagtc

SEQ ID NO: 3124 - DNA, 21 bp, synthetic construct
  misc_feature 1..21: note = n-mer motif encoding polynucleotide
  source 1..21: mol_type = other DNA
agtgttctgagtagttcgact

SEQ ID NO: 3125 - DNA, 21 bp, synthetic construct
  source 1..21: mol_type = other DNA
  misc_feature 1..21: note = n-mer motif encoding polynucleotide
ttagcacaaggcacggaccgg

SEQ ID NO: 3126 - DNA, 21 bp, synthetic construct
  source 1..21: mol_type = other DNA
  misc_feature 1..21: note = n-mer motif encoding polynucleotide
cagtctgtgtcgactggggcg

SEQ ID NO: 3127 - DNA, 21 bp, synthetic construct
  misc_feature 1..21: note = n-mer motif encoding polynucleotide
  source 1..21: mol_type = other DNA
ttgacgcaggtttatcatgag

SEQ ID NO: 3128 - DNA, 21 bp, synthetic construct
  misc_feature 1..21: note = n-mer motif encoding polynucleotide
  source 1..21: mol_type = other DNA
agagaaatgagcagcctatct

SEQ ID NO: 3129 - DNA, 21 bp, synthetic construct
  misc_feature 1..21: note = n-mer motif encoding polynucleotide
  source 1..21: mol_type = other DNA
acgagtacgatgactgcgcgt

SEQ ID NO: 3130 - DNA, 21 bp, synthetic construct
  misc_feature 1..21: note = n-mer motif encoding polynucleotide
  source 1..21: mol_type = other DNA
actattcagcaggttagtaat

SEQ ID NO: 3131 - DNA, 21 bp, synthetic construct
  source 1..21: mol_type = other DNA
  misc_feature 1..21: note = n-mer motif encoding polynucleotide
aggacgcaagcaggggactca

SEQ ID NO: 3132 - DNA, 21 bp, synthetic construct
  misc_feature 1..21: note = n-mer motif encoding polynucleotide
  source 1..21: mol_type = other DNA
aatacttatactgctgggaag

SEQ ID NO: 3133 - DNA, 21 bp, synthetic construct
  source 1..21: mol_type = other DNA
  misc_feature 1..21: note = n-mer motif encoding polynucleotide
aatgagcagaatacgccgagt

SEQ ID NO: 3134 - DNA, 21 bp, synthetic construct
  misc_feature 1..21: note = n-mer motif encoding polynucleotide
  source 1..21: mol_type = other DNA
ggattcgcccaacaagaagcg

SEQ ID NO: 3135 - DNA, 21 bp, synthetic construct
  misc_feature 1..21: note = n-mer motif encoding polynucleotide
  source 1..21: mol_type = other DNA
agtccgcagcatggtgttatt

SEQ ID NO: 3136 - DNA, 21 bp, synthetic construct
  misc_feature 1..21: note = n-mer motif encoding polynucleotide
  source 1..21: mol_type = other DNA
gcagtccacgcaacatcatca

SEQ ID NO: 3137 - DNA, 21 bp, synthetic construct
  source 1..21: mol_type = other DNA
  misc_feature 1..21: note = n-mer motif encoding polynucleotide
ggagacacccgtggtgcacac

SEQ ID NO: 3138 - DNA, 21 bp, synthetic construct
  misc_feature 1..21: note = n-mer motif encoding polynucleotide
  source 1..21: mol_type = other DNA
gtaagagaaaccacacacctc

SEQ ID NO: 3139 - DNA, 21 bp, synthetic construct
  source 1..21: mol_type = other DNA
  misc_feature 1..21: note = n-mer motif encoding polynucleotide
ctttctcaacaacgcgactac

SEQ ID NO: 3140 - DNA, 21 bp, synthetic construct
  misc_feature 1..21: note = n-mer motif encoding polynucleotide
  source 1..21: mol_type = other DNA
gcgactaggggtgagtcgtct

SEQ ID NO: 3141 - DNA, 21 bp, synthetic construct
  misc_feature 1..21: note = n-mer motif encoding polynucleotide
  source 1..21: mol_type = other DNA
actaatgattctgtgggtagt

SEQ ID NO: 3142 - DNA, 21 bp, synthetic construct
  misc_feature 1..21: note = n-mer motif encoding polynucleotide
  source 1..21: mol_type = other DNA
cttactaataattttaaggat

SEQ ID NO: 3143 - DNA, 21 bp, synthetic construct
  misc_feature 1..21: note = n-mer motif encoding polynucleotide
  source 1..21: mol_type = other DNA
gtgaatgggactcagattttt

SEQ ID NO: 3144 - DNA, 21 bp, synthetic construct
  misc_feature 1..21: note = n-mer motif encoding polynucleotide
  source 1..21: mol_type = other DNA
ggtaatactgggagtccgggg

SEQ ID NO: 3145 - DNA, 21 bp, synthetic construct
  misc_feature 1..21: note = n-mer motif encoding polynucleotide
  source 1..21: mol_type = other DNA
tggacagctaaccaaggctta

SEQ ID NO: 3146 - DNA, 21 bp, synthetic construct
  source 1..21: mol_type = other DNA
  misc_feature 1..21: note = n-mer motif encoding polynucleotide
aatactactccgacgaatcat

SEQ ID NO: 3147 - DNA, 21 bp, synthetic construct
  source 1..21: mol_type = other DNA
  misc_feature 1..21: note = n-mer motif encoding polynucleotide
gaacgagtcaacgggatggca

SEQ ID NO: 3148 - DNA, 21 bp, synthetic construct
  misc_feature 1..21: note = n-mer motif encoding polynucleotide
  source 1..21: mol_type = other DNA
aaagtcacaaacaacgcatac

SEQ ID NO: 3149 - DNA, 21 bp, synthetic construct
  source 1..21: mol_type = other DNA
  misc_feature 1..21: note = n-mer motif encoding polynucleotide
ttatcctccgaatcacccagg

SEQ ID NO: 3150 - DNA, 21 bp, synthetic construct
  source 1..21: mol_type = other DNA
  misc_feature 1..21: note = n-mer motif encoding polynucleotide
catacggcggcggttgctact

SEQ ID NO: 3151 - DNA, 21 bp, synthetic construct
  misc_feature 1..21: note = n-mer motif encoding polynucleotide
  source 1..21: mol_type = other DNA
tacgacagccgactctacgcg

SEQ ID NO: 3152 - DNA, 21 bp, synthetic construct
  source 1..21: mol_type = other DNA
  misc_feature 1..21: note = n-mer motif encoding polynucleotide
atagaacacatgcttagaccc

SEQ ID NO: 3153 - DNA, 21 bp, synthetic construct
  source 1..21: mol_type = other DNA
  misc_feature 1..21: note = n-mer motif encoding polynucleotide
tacctagaatccaactacacc

SEQ ID NO: 3154 - DNA, 21 bp, synthetic construct
  source 1..21: mol_type = other DNA
  misc_feature 1..21: note = n-mer motif encoding polynucleotide
gcgtactcatctaccgggcac

SEQ ID NO: 3155 - DNA, 21 bp, synthetic construct
  misc_feature 1..21: note = n-mer motif encoding polynucleotide
  source 1..21: mol_type = other DNA
atcgacatatcgacgcaaagc

SEQ ID NO: 3156 - DNA, 21 bp, synthetic construct
  source 1..21: mol_type = other DNA
  misc_feature 1..21: note = n-mer motif encoding polynucleotide
acaacaaactcaggcgcgacg

SEQ ID NO: 3157 - DNA, 21 bp, synthetic construct
  source 1..21: mol_type = other DNA
  misc_feature 1..21: note = n-mer motif encoding polynucleotide
aacgtgctaaccacggttgtc

SEQ ID NO: 3158 - DNA, 21 bp, synthetic construct
  misc_feature 1..21: note = n-mer motif encoding polynucleotide
  source 1..21: mol_type = other DNA
acaaccggaatcgaacgttcc

SEQ ID NO: 3159 - DNA, 21 bp, synthetic construct
  misc_feature 1..21: note = n-mer motif encoding polynucleotide
  source 1..21: mol_type = other DNA
gcacgagtggacaccaaccaa

SEQ ID NO: 3160 - DNA, 21 bp, synthetic construct
  source 1..21: mol_type = other DNA
  misc_feature 1..21: note = n-mer motif encoding polynucleotide
cagagtgtgaaggaggcgatt

SEQ ID NO: 3161 - DNA, 21 bp, synthetic construct
  misc_feature 1..21: note = n-mer motif encoding polynucleotide
  source 1..21: mol_type = other DNA
gcgttgcttagtgtgaatgag

SEQ ID NO: 3162 - DNA, 21 bp, synthetic construct
  misc_feature 1..21: note = n-mer motif encoding polynucleotide
  source 1..21: mol_type = other DNA
gggcgtgataatcatcatgcg

SEQ ID NO: 3163 - DNA, 21 bp, synthetic construct
  source 1..21: mol_type = other DNA
  misc_feature 1..21: note = n-mer motif encoding polynucleotide
attcagtcgcagtcgcagttg

SEQ ID NO: 3164 - DNA, 21 bp, synthetic construct
  misc_feature 1..21: note = n-mer motif encoding polynucleotide
  source 1..21: mol_type = other DNA
agtgagggtagttcgcggtcg

SEQ ID NO: 3165 - DNA, 21 bp, synthetic construct
  misc_feature 1..21: note = n-mer motif encoding polynucleotide
  source 1..21: mol_type = other DNA
gacgtccaaaacatacgcgaa

SEQ ID NO: 3166 - DNA, 21 bp, synthetic construct
  source 1..21: mol_type = other DNA
  misc_feature 1..21: note = n-mer motif encoding polynucleotide
aaaggccacgcctacgaagcc

SEQ ID NO: 3167 - DNA, 21 bp, synthetic construct
  source 1..21: mol_type = other DNA
  misc_feature 1..21: note = n-mer motif encoding polynucleotide
tatgttagggcgcaggatcag

SEQ ID NO: 3168 - DNA, 21 bp, synthetic construct
  misc_feature 1..21: note = n-mer motif encoding polynucleotide
  source 1..21: mol_type = other DNA
gtcgacgaataccgaagccgc

SEQ ID NO: 3169 - DNA, 21 bp, synthetic construct
  misc_feature 1..21: note = n-mer motif encoding polynucleotide
  source 1..21: mol_type = other DNA
actctctcaggctacatgaga

SEQ ID NO: 3170 - DNA, 21 bp, synthetic construct
  misc_feature 1..21: note = n-mer motif encoding polynucleotide
  source 1..21: mol_type = other DNA
cctagtgtccgtttgccctta

SEQ ID NO: 3171 - DNA, 21 bp, synthetic construct
  misc_feature 1..21: note = n-mer motif encoding polynucleotide
  source 1..21: mol_type = other DNA
aacatagcaggcggagaacaa

SEQ ID NO: 3172 - DNA, 21 bp, synthetic construct
  misc_feature 1..21: note = n-mer motif encoding polynucleotide
  source 1..21: mol_type = other DNA
ctgctccaatcgacctacttg

SEQ ID NO: 3173 - DNA, 21 bp, synthetic construct
  misc_feature 1..21: note = n-mer motif encoding polynucleotide
  source 1..21: mol_type = other DNA
cagtcggatacgacttcgatt

SEQ ID NO: 3174 - DNA, 21 bp, synthetic construct
  misc_feature 1..21: note = n-mer motif encoding polynucleotide
  source 1..21: mol_type = other DNA
attaggtctgggaatgcgatg

SEQ ID NO: 3175 - DNA, 21 bp, synthetic construct
  misc_feature 1..21: note = n-mer motif encoding polynucleotide
  source 1..21: mol_type = other DNA
atgctgtctcaagtcttaaca

SEQ ID NO: 3176 - DNA, 21 bp, synthetic construct
  source 1..21: mol_type = other DNA
  misc_feature 1..21: note = n-mer motif encoding polynucleotide
acagaacgccaaatcgaatta

SEQ ID NO: 3177 - DNA, 21 bp, synthetic construct
  source 1..21: mol_type = other DNA
  misc_feature 1..21: note = n-mer motif encoding polynucleotide
ggaacccacgcctcagcatac

SEQ ID NO: 3178 - DNA, 21 bp, synthetic construct
  misc_feature 1..21: note = n-mer motif encoding polynucleotide
  source 1..21: mol_type = other DNA
gttgagtcttcttattctcgg

SEQ ID NO: 3179 - DNA, 21 bp, synthetic construct
  misc_feature 1..21: note = n-mer motif encoding polynucleotide
  source 1..21: mol_type = other DNA
ggtgggaattatcatactaag

SEQ ID NO: 3180 - DNA, 21 bp, synthetic construct
  source 1..21: mol_type = other DNA
  misc_feature 1..21: note = n-mer motif encoding polynucleotide
cccaccagtcaccaagaaccc

SEQ ID NO: 3181 - DNA, 21 bp, synthetic construct
  misc_feature 1..21: note = n-mer motif encoding polynucleotide
  source 1..21: mol_type = other DNA
accataatcggtgtcttaccc

SEQ ID NO: 3182 - DNA, 21 bp, synthetic construct
  source 1..21: mol_type = other DNA
  misc_feature 1..21: note = n-mer motif encoding polynucleotide
tctaacagcggttctaccctc

SEQ ID NO: 3183 - DNA, 21 bp, synthetic construct
  source 1..21: mol_type = other DNA
  misc_feature 1..21: note = n-mer motif encoding polynucleotide
tcgataacgaccgtagcgaac

SEQ ID NO: 3184 - DNA, 21 bp, synthetic construct
  source 1..21: mol_type = other DNA
  misc_feature 1..21: note = n-mer motif encoding polynucleotide
gcgtctccggcgcagaccggc

SEQ ID NO: 3185 - DNA, 21 bp, synthetic construct
  source 1..21: mol_type = other DNA
  misc_feature 1..21: note = n-mer motif encoding polynucleotide
tcgttgccgagtcatagtaat

SEQ ID NO: 3186 - DNA, 21 bp, synthetic construct
  misc_feature 1..21: note = n-mer motif encoding polynucleotide
  source 1..21: mol_type = other DNA
ctacacaacgccgtcggaccc

SEQ ID NO: 3187 - DNA, 21 bp, synthetic construct
  misc_feature 1..21: note = n-mer motif encoding polynucleotide
  source 1..21: mol_type = other DNA
caagccccgccaacagcacaa

SEQ ID NO: 3188 - DNA, 21 bp, synthetic construct
  source 1..21: mol_type = other DNA
  misc_feature 1..21: note = n-mer motif encoding polynucleotide
cctaatactgctagtaatttt

SEQ ID NO: 3189 - DNA, 21 bp, synthetic construct
  misc_feature 1..21: note = n-mer motif encoding polynucleotide
  source 1..21: mol_type = other DNA
ccctccaacagtgaaagattc

SEQ ID NO: 3190 - DNA, 21 bp, synthetic construct
  misc_feature 1..21: note = n-mer motif encoding polynucleotide
  source 1..21: mol_type = other DNA
gaactccacgcacaacaacca

SEQ ID NO: 3191 - DNA, 21 bp, synthetic construct
  misc_feature 1..21: note = n-mer motif encoding polynucleotide
  source 1..21: mol_type = other DNA
ggttcttattctgatggtagt

SEQ ID NO: 3192 - DNA, 21 bp, synthetic construct
  misc_feature 1..21: note = n-mer motif encoding polynucleotide
  source 1..21: mol_type = other DNA
tatggtgtgcaggcgaatagt

SEQ ID NO: 3193 - DNA, 21 bp, synthetic construct
  misc_feature 1..21: note = n-mer motif encoding polynucleotide
  source 1..21: mol_type = other DNA
gaagtaggtaaaaccacccac

SEQ ID NO: 3194 - DNA, 21 bp, synthetic construct
  source 1..21: mol_type = other DNA
  misc_feature 1..21: note = n-mer motif encoding polynucleotide
acttcgcagggtaggagtcct

SEQ ID NO: 3195 - DNA, 21 bp, synthetic construct
  source 1..21: mol_type = other DNA
  misc_feature 1..21: note = n-mer motif encoding polynucleotide
gtagaacacgtagcccaccaa

SEQ ID NO: 3196 - DNA, 21 bp, synthetic construct
  source 1..21: mol_type = other DNA
  misc_feature 1..21: note = n-mer motif encoding polynucleotide
atccaaagcagctacaaccgc

SEQ ID NO: 3197 - DNA, 21 bp, synthetic construct
  misc_feature 1..21: note = n-mer motif encoding polynucleotide
  source 1..21: mol_type = other DNA
acgctatcggttaccctgggt

SEQ ID NO: 3198 - DNA, 21 bp, synthetic construct
  source 1..21: mol_type = other DNA
  misc_feature 1..21: note = n-mer motif encoding polynucleotide
cggaatgagccggttagtact

SEQ ID NO: 3199 - DNA, 21 bp, synthetic construct
  source 1..21: mol_type = other DNA
  misc_feature 1..21: note = n-mer motif encoding polynucleotide
gtgattgtggggagtaatgag

SEQ ID NO: 3200 - DNA, 21 bp, synthetic construct
  source 1..21: mol_type = other DNA
  misc_feature 1..21: note = n-mer motif encoding polynucleotide
gagctgtctactcctatggtt

SEQ ID NO: 3201 - DNA, 21 bp, synthetic construct
  source 1..21: mol_type = other DNA
  misc_feature 1..21: note = n-mer motif encoding polynucleotide
gcttacaacgacctacgatca

SEQ ID NO: 3202 - DNA, 21 bp, synthetic construct
  misc_feature 1..21: note = n-mer motif encoding polynucleotide
  source 1..21: mol_type = other DNA
aacgcgaactccggtgaacga

SEQ ID NO: 3203 - DNA, 21 bp, synthetic construct
  source 1..21: mol_type = other DNA
  misc_feature 1..21: note = n-mer motif encoding polynucleotide
ttgtcatcacaatggacacaa

SEQ ID NO: 3204 - DNA, 21 bp, synthetic construct
  source 1..21: mol_type = other DNA
  misc_feature 1..21: note = n-mer motif encoding polynucleotide
atcaacgccggcaactaccga

SEQ ID NO: 3205 - DNA, 21 bp, synthetic construct
  source 1..21: mol_type = other DNA
  misc_feature 1..21: note = n-mer motif encoding polynucleotide
ctgaggtcgagtgaggctccg

SEQ ID NO: 3206 - DNA, 21 bp, synthetic construct
  source 1..21: mol_type = other DNA
  misc_feature 1..21: note = n-mer motif encoding polynucleotide
acgtctgatacgaatgctagg

SEQ ID NO: 3207 - DNA, 21 bp, synthetic construct
  source 1..21: mol_type = other DNA
  misc_feature 1..21: note = n-mer motif encoding polynucleotide
ccgaattctccgcatggttct

SEQ ID NO: 3208 - DNA, 21 bp, synthetic construct
  misc_feature 1..21: note = n-mer motif encoding polynucleotide
  source 1..21: mol_type = other DNA
acccaacacctaccatccaca

SEQ ID NO: 3209 - DNA, 21 bp, synthetic construct
  misc_feature 1..21: note = n-mer motif encoding polynucleotide
  source 1..21: mol_type = other DNA
gtgcatgggaatgctccggct

SEQ ID NO: 3210 - DNA, 21 bp, synthetic construct
  misc_feature 1..21: note = n-mer motif encoding polynucleotide
  source 1..21: mol_type = other DNA
tcttctcagcgtgattctgtt

SEQ ID NO: 3211 - DNA, 21 bp, synthetic construct
  source 1..21: mol_type = other DNA
  misc_feature 1..21: note = n-mer motif encoding polynucleotide
cccccctcagttgaccgaaaa

SEQ ID NO: 3212 - DNA, 21 bp, synthetic construct
  misc_feature 1..21: note = n-mer motif encoding polynucleotide
  source 1..21: mol_type = other DNA
gagactctgccgtataagagt

SEQ ID NO: 3213 - DNA, 21 bp, synthetic construct
  misc_feature 1..21: note = n-mer motif encoding polynucleotide
  source 1..21: mol_type = other DNA
catcttagtcaggctaatcat

SEQ ID NO: 3214 - DNA, 21 bp, synthetic construct
  misc_feature 1..21: note = n-mer motif encoding polynucleotide
  source 1..21: mol_type = other DNA
aaaccgctaaacggtaccaac

SEQ ID NO: 3215 - DNA, 21 bp, synthetic construct
  misc_feature 1..21: note = n-mer motif encoding polynucleotide
  source 1..21: mol_type = other DNA
tggcaaaccaacggcatgcaa

SEQ ID NO: 3216 - DNA, 21 bp, synthetic construct
  source 1..21: mol_type = other DNA
  misc_feature 1..21: note = n-mer motif encoding polynucleotide
accgtgaacgtccactccgac

SEQ ID NO: 3217 - DNA, 21 bp, synthetic construct
  misc_feature 1..21: note = n-mer motif encoding polynucleotide
  source 1..21: mol_type = other DNA
acccaatacgtcgttgcccct

SEQ ID NO: 3218 - DNA, 21 bp, synthetic construct
  misc_feature 1..21: note = n-mer motif encoding polynucleotide
  source 1..21: mol_type = other DNA
aacgtcgactcctctaacgtg

SEQ ID NO: 3219 - DNA, 21 bp, synthetic construct
  misc_feature 1..21: note = n-mer motif encoding polynucleotide
  source 1..21: mol_type = other DNA
aacggataccaactacaaatc

SEQ ID NO: 3220 - DNA, 21 bp, synthetic construct
  misc_feature 1..21: note = n-mer motif encoding polynucleotide
  source 1..21: mol_type = other DNA
gaagaaacacggaccagaatg

SEQ ID NO: 3221 - DNA, 21 bp, synthetic construct
  misc_feature 1..21: note = n-mer motif encoding polynucleotide
  source 1..21: mol_type = other DNA
acctctccagcctctgaccgg

SEQ ID NO: 3222 - DNA, 21 bp, synthetic construct
  misc_feature 1..21: note = n-mer motif encoding polynucleotide
  source 1..21: mol_type = other DNA
catagtggtgctggggttctg

SEQ ID NO: 3223 - DNA, 21 bp, synthetic construct
  source 1..21: mol_type = other DNA
  misc_feature 1..21: note = n-mer motif encoding polynucleotide
gctgctaatcctagtacggag

SEQ ID NO: 3224 - DNA, 21 bp, synthetic construct
  source 1..21: mol_type = other DNA
  misc_feature 1..21: note = n-mer motif encoding polynucleotide
atgttggtacaaaacacaccc

SEQ ID NO: 3225 - DNA, 21 bp, synthetic construct
  source 1..21: mol_type = other DNA
  misc_feature 1..21: note = n-mer motif encoding polynucleotide
gtgcagcagaataatattaat

SEQ ID NO: 3226 - DNA, 21 bp, synthetic construct
  source 1..21: mol_type = other DNA
  misc_feature 1..21: note = n-mer motif encoding polynucleotide
catgatggttatgttcctaat

SEQ ID NO: 3227 - DNA, 21 bp, synthetic construct
  misc_feature 1..21: note = n-mer motif encoding polynucleotide
  source 1..21: mol_type = other DNA
aactcaggtaacaaccccatc

SEQ ID NO: 3228 - DNA, 21 bp, synthetic construct
  misc_feature 1..21: note = n-mer motif encoding polynucleotide
  source 1..21: mol_type = other DNA
acggacaacccgtcctacaaa

SEQ ID NO: 3229 - DNA, 21 bp, synthetic construct
  misc_feature 1..21: note = n-mer motif encoding polynucleotide
  source 1..21: mol_type = other DNA
ggaggcttaagtttatcctcg

SEQ ID NO: 3230 - DNA, 21 bp, synthetic construct
  misc_feature 1..21: note = n-mer motif encoding polynucleotide
  source 1..21: mol_type = other DNA
aataatgagaatacgcgtaat

SEQ ID NO: 3231 - DNA, 21 bp, synthetic construct
  source 1..21: mol_type = other DNA
  misc_feature 1..21: note = n-mer motif encoding polynucleotide
aagaataataattctgattct

SEQ ID NO: 3232 - DNA, 21 bp, synthetic construct
  misc_feature 1..21: note = n-mer motif encoding polynucleotide
  source 1..21: mol_type = other DNA
aaggatgagcatcttcattat

SEQ ID NO: 3233 - DNA, 21 bp, synthetic construct
  misc_feature 1..21: note = n-mer motif encoding polynucleotide
  source 1..21: mol_type = other DNA
aattttactattacggaggcg

SEQ ID NO: 3234 - DNA, 21 bp, synthetic construct
  misc_feature 1..21: note = n-mer motif encoding polynucleotide
  source 1..21: mol_type = other DNA
ttgaaccaaaacagtgtctcc

SEQ ID NO: 3235 - DNA, 21 bp, synthetic construct
  misc_feature 1..21: note = n-mer motif encoding polynucleotide
  source 1..21: mol_type = other DNA
aattctcatgttcctaataat

SEQ ID NO: 3236 - DNA, 21 bp, synthetic construct
  misc_feature 1..21: note = n-mer motif encoding polynucleotide
  source 1..21: mol_type = other DNA
aattctacgcatattaattcg

SEQ ID NO: 3237 - DNA, 21 bp, synthetic construct
  source 1..21: mol_type = other DNA
  misc_feature 1..21: note = n-mer motif encoding polynucleotide
catatgtctagttattcgtcg

SEQ ID NO: 3238 - DNA, 21 bp, synthetic construct
  misc_feature 1..21: note = n-mer motif encoding polynucleotide
  source 1..21: mol_type = other DNA
aacgtacccaacggacaagga

SEQ ID NO: 3239 - DNA, 21 bp, synthetic construct
  source 1..21: mol_type = other DNA
  misc_feature 1..21: note = n-mer motif encoding polynucleotide
aacggtccgaccggatccgcc

SEQ ID NO: 3240 - DNA, 21 bp, synthetic construct
  source 1..21: mol_type = other DNA
  misc_feature 1..21: note = n-mer motif encoding polynucleotide
aaaagcaacgcgggattcggt

SEQ ID NO: 3241 - DNA, 21 bp, synthetic construct
  misc_feature 1..21: note = n-mer motif encoding polynucleotide
  source 1..21: mol_type = other DNA
gcggccgcactagaaacaata

SEQ ID NO: 3242 - DNA, 21 bp, synthetic construct
  misc_feature 1..21: note = n-mer motif encoding polynucleotide
  source 1..21: mol_type = other DNA
aaccgtcaaagggacttcgaa

SEQ ID NO: 3243 - DNA, 21 bp, synthetic construct
  misc_feature 1..21: note = n-mer motif encoding polynucleotide
  source 1..21: mol_type = other DNA
gggtcagggaacgaacccggg

SEQ ID NO: 3244 - DNA, 21 bp, synthetic construct
  source 1..21: mol_type = other DNA
  misc_feature 1..21: note = n-mer motif encoding polynucleotide
gttagtgtggctgtgcctgcg

SEQ ID NO: 3245 - DNA, 21 bp, synthetic construct
  source 1..21: mol_type = other DNA
  misc_feature 1..21: note = n-mer motif encoding polynucleotide
cactctaacacacactacgaa

SEQ ID NO: 3246 - DNA, 21 bp, synthetic construct
  source 1..21: mol_type = other DNA
  misc_feature 1..21: note = n-mer motif encoding polynucleotide
cctgacagagcgaacgacaaa

SEQ ID NO: 3247 - DNA, 21 bp, synthetic construct
  source 1..21: mol_type = other DNA
  misc_feature 1..21: note = n-mer motif encoding polynucleotide
caagttggggctctaatggtt

SEQ ID NO: 3248 - DNA, 21 bp, synthetic construct
  source 1..21: mol_type = other DNA
  misc_feature 1..21: note = n-mer motif encoding polynucleotide
ttaacaccccaagggactagt

SEQ ID NO: 3249 - DNA, 21 bp, synthetic construct
  misc_feature 1..21: note = n-mer motif encoding polynucleotide
  source 1..21: mol_type = other DNA
ctatacgacggaaaacacgtc

SEQ ID NO: 3250 - DNA, 21 bp, synthetic construct
  misc_feature 1..21: note = n-mer motif encoding polynucleotide
  source 1..21: mol_type = other DNA
ctaaccgaatctgtgagaaac

SEQ ID NO: 3251 - DNA, 21 bp, synthetic construct
  misc_feature 1..21: note = n-mer motif encoding polynucleotide
  source 1..21: mol_type = other DNA
agtacttatgggaatacttat

SEQ ID NO: 3252 - DNA, 21 bp, synthetic construct
  source 1..21: mol_type = other DNA
  misc_feature 1..21: note = n-mer motif encoding polynucleotide
aatgctatttctactaataat

SEQ ID NO: 3253 - DNA, 21 bp, synthetic construct
  source 1..21: mol_type = other DNA
  misc_feature 1..21: note = n-mer motif encoding polynucleotide
attgctcatgtgtctactaat

SEQ ID NO: 3254 - DNA, 21 bp, synthetic construct
  source 1..21: mol_type = other DNA
  misc_feature 1..21: note = n-mer motif encoding polynucleotide
agtgaggagaggacgcgtgcg

SEQ ID NO: 3255 - DNA, 21 bp, synthetic construct
  misc_feature 1..21: note = n-mer motif encoding polynucleotide
  source 1..21: mol_type = other DNA
cgttggtctgaaaacaactcc

SEQ ID NO: 3256 - DNA, 21 bp, synthetic construct
  misc_feature 1..21: note = n-mer motif encoding polynucleotide
  source 1..21: mol_type = other DNA
gatggtaataatacgacttat

SEQ ID NO: 3257 - DNA, 21 bp, synthetic construct
  source 1..21: mol_type = other DNA
  misc_feature 1..21: note = n-mer motif encoding polynucleotide
gtgacgactgttgatagtgct

SEQ ID NO: 3258 - DNA, 21 bp, synthetic construct
  misc_feature 1..21: note = n-mer motif encoding polynucleotide
  source 1..21: mol_type = other DNA
accgtaaaacaaacaagtccg

SEQ ID NO: 3259 - DNA, 21 bp, synthetic construct
  source 1..21: mol_type = other DNA
  misc_feature 1..21: note = n-mer motif encoding polynucleotide
tctatctacctcgcgtccact

SEQ ID NO: 3260 - DNA, 21 bp, synthetic construct
  source 1..21: mol_type = other DNA
  misc_feature 1..21: note = n-mer motif encoding polynucleotide
acgacccgaaacgaacactcg

SEQ ID NO: 3261 - DNA, 21 bp, synthetic construct
  misc_feature 1..21: note = n-mer motif encoding polynucleotide
  source 1..21: mol_type = other DNA
tcgtatgatatgcatacgaat

SEQ ID NO: 3262 - DNA, 21 bp, synthetic construct
  misc_feature 1..21: note = n-mer motif encoding polynucleotide
  source 1..21: mol_type = other DNA
gtctctacatacctcctggca

SEQ ID NO: 3263 - DNA, 21 bp, synthetic construct
  misc_feature 1..21: note = n-mer motif encoding polynucleotide
  source 1..21: mol_type = other DNA
ggagaacaaagccacaaccaa

SEQ ID NO: 3264 - DNA, 21 bp, synthetic construct
  source 1..21: mol_type = other DNA
  misc_feature 1..21: note = n-mer motif encoding polynucleotide
actgccaacaaccactctccg

SEQ ID NO: 3265 - DNA, 21 bp, synthetic construct
  source 1..21: mol_type = other DNA
  misc_feature 1..21: note = n-mer motif encoding polynucleotide
caattccacgggacatctgaa

SEQ ID NO: 3266 - DNA, 21 bp, synthetic construct
  source 1..21: mol_type = other DNA
  misc_feature 1..21: note = n-mer motif encoding polynucleotide
aacgttctgggagcgtctagc

SEQ ID NO: 3267 - DNA, 21 bp, synthetic construct
  misc_feature 1..21: note = n-mer motif encoding polynucleotide
  source 1..21: mol_type = other DNA
agggatagtactattagtcgg

SEQ ID NO: 3268 - DNA, 21 bp, synthetic construct
  source 1..21: mol_type = other DNA
  misc_feature 1..21: note = n-mer motif encoding polynucleotide
gttattgggacttctagggat

SEQ ID NO: 3269 - DNA, 21 bp, synthetic construct
  source 1..21: mol_type = other DNA
  misc_feature 1..21: note = n-mer motif encoding polynucleotide
aattatgagaaggagtttgtt

SEQ ID NO: 3270 - DNA, 21 bp, synthetic construct
  source 1..21: mol_type = other DNA
  misc_feature 1..21: note = n-mer motif encoding polynucleotide
atggaccaaagccactcccga

SEQ ID NO: 3271 - DNA, 21 bp, synthetic construct
  misc_feature 1..21: note = n-mer motif encoding polynucleotide
  source 1..21: mol_type = other DNA
aattctcagaatcctcagggt

SEQ ID NO: 3272 - DNA, 21 bp, synthetic construct
  source 1..21: mol_type = other DNA
  misc_feature 1..21: note = n-mer motif encoding polynucleotide
cacacgggcacggacaaccga

SEQ ID NO: 3273 - DNA, 21 bp, synthetic construct
  source 1..21: mol_type = other DNA
  misc_feature 1..21: note = n-mer motif encoding polynucleotide
tataatactgttgatcagcgg

SEQ ID NO: 3274 - DNA, 21 bp, synthetic construct
  misc_feature 1..21: note = n-mer motif encoding polynucleotide
  source 1..21: mol_type = other DNA
aaagaaagcctcgaagacgtc

SEQ ID NO: 3275 - DNA, 21 bp, synthetic construct
  source 1..21: mol_type = other DNA
  misc_feature 1..21: note = n-mer motif encoding polynucleotide
actgcgaatagtacgtatgtg

SEQ ID NO: 3276 - DNA, 21 bp, synthetic construct
  misc_feature 1..21: note = n-mer motif encoding polynucleotide
  source 1..21: mol_type = other DNA
tatctgaatagtacgcagatt

SEQ ID NO: 3277 - DNA, 21 bp, synthetic construct
  misc_feature 1..21: note = n-mer motif encoding polynucleotide
  source 1..21: mol_type = other DNA
cgtgttgaagacaccaactcc

SEQ ID NO: 3278 - DNA, 21 bp, synthetic construct
  source 1..21: mol_type = other DNA
  misc_feature 1..21: note = n-mer motif encoding polynucleotide
aacgacgcacgcaaccgtgca

SEQ ID NO: 3279 - DNA, 21 bp, synthetic construct
  source 1..21: mol_type = other DNA
  misc_feature 1..21: note = n-mer motif encoding polynucleotide
aatactaataatcaggagcag

SEQ ID NO: 3280 - DNA, 21 bp, synthetic construct
  misc_feature 1..21: note = n-mer motif encoding polynucleotide
  source 1..21: mol_type = other DNA
accgtcggatcgaacagtata

SEQ ID NO: 3281 - DNA, 21 bp, synthetic construct
  misc_feature 1..21: note = n-mer motif encoding polynucleotide
  source 1..21: mol_type = other DNA
tatggggagcgtgctaggacg

SEQ ID NO: 3282 - DNA, 21 bp, synthetic construct
  misc_feature 1..21: note = n-mer motif encoding polynucleotide
  source 1..21: mol_type = other DNA
ccgaccggaggctcaccacca

SEQ ID NO: 3283 - DNA, 21 bp, synthetic construct
  source 1..21: mol_type = other DNA
  misc_feature 1..21: note = n-mer motif encoding polynucleotide
cttgggcaggttaattctacg

SEQ ID NO: 3284 - DNA, 21 bp, synthetic construct
  misc_feature 1..21: note = n-mer motif encoding polynucleotide
  source 1..21: mol_type = other DNA
gtctcgggtccggtatcggtc

SEQ ID NO: 3285 - DNA, 21 bp, synthetic construct
  misc_feature 1..21: note = n-mer motif encoding polynucleotide
  source 1..21: mol_type = other DNA
ggtactaatcatgatttttcg

SEQ ID NO: 3286 - DNA, 21 bp, synthetic construct
  source 1..21: mol_type = other DNA
  misc_feature 1..21: note = n-mer motif encoding polynucleotide
aagacgcttgataataatgct

SEQ ID NO: 3287 - DNA, 21 bp, synthetic construct
  source 1..21: mol_type = other DNA
  misc_feature 1..21: note = n-mer motif encoding polynucleotide
cacagtgaactacgtcaaaac

SEQ ID NO: 3288 - DNA, 21 bp, synthetic construct
  source 1..21: mol_type = other DNA
  misc_feature 1..21: note = n-mer motif encoding polynucleotide
gagaagaatctgactaatgct

SEQ ID NO: 3289 - DNA, 21 bp, synthetic construct
  misc_feature 1..21: note = n-mer motif encoding polynucleotide
  source 1..21: mol_type = other DNA
accggactcggaggcaacagt

SEQ ID NO: 3290 - DNA, 21 bp, synthetic construct
  source 1..21: mol_type = other DNA
  misc_feature 1..21: note = n-mer motif encoding polynucleotide
aaagaccacatcctcagcctc

SEQ ID NO: 3291 - DNA, 21 bp, synthetic construct
  source 1..21: mol_type = other DNA
  misc_feature 1..21: note = n-mer motif encoding polynucleotide
ataactactggcggagtgcta

SEQ ID NO: 3292 - DNA, 21 bp, synthetic construct
  misc_feature 1..21: note = n-mer motif encoding polynucleotide
  source 1..21: mol_type = other DNA
ctggctgattcgaattctaag

SEQ ID NO: 3293 - DNA, 21 bp, synthetic construct
  source 1..21: mol_type = other DNA
  misc_feature 1..21: note = n-mer motif encoding polynucleotide
agtatttctgataagaatcag

SEQ ID NO: 3294 - DNA, 21 bp, synthetic construct
  source 1..21: mol_type = other DNA
  misc_feature 1..21: note = n-mer motif encoding polynucleotide
tatattgctgggggggagcag

SEQ ID NO: 3295 - DNA, 21 bp, synthetic construct
  source 1..21: mol_type = other DNA
  misc_feature 1..21: note = n-mer motif encoding polynucleotide
ttgccggataaggggcggatt

SEQ ID NO: 3296 - DNA, 21 bp, synthetic construct
  misc_feature 1..21: note = n-mer motif encoding polynucleotide
  source 1..21: mol_type = other DNA
ttgatccaaacgcaaggcacg

SEQ ID NO: 3297 - DNA, 21 bp, synthetic construct
  source 1..21: mol_type = other DNA
  misc_feature 1..21: note = n-mer motif encoding polynucleotide
tactccggagaactaaacaaa

SEQ ID NO: 3298 - DNA, 21 bp, synthetic construct
  source 1..21: mol_type = other DNA
  misc_feature 1..21: note = n-mer motif encoding polynucleotide
tgcgcatcagaagtttgccaa

SEQ ID NO: 3299 - DNA, 21 bp, synthetic construct
  source 1..21: mol_type = other DNA
  misc_feature 1..21: note = n-mer motif encoding polynucleotide
cttatggctgctaatactgcg

SEQ ID NO: 3300 - DNA, 21 bp, synthetic construct
  misc_feature 1..21: note = n-mer motif encoding polynucleotide
  source 1..21: mol_type = other DNA
catcagtcttttgatgctggt

SEQ ID NO: 3301 - DNA, 21 bp, synthetic construct
  source 1..21: mol_type = other DNA
  misc_feature 1..21: note = n-mer motif encoding polynucleotide
ggggagacgctgaggtctcag

SEQ ID NO: 3302 - DNA, 21 bp, synthetic construct
  source 1..21: mol_type = other DNA
  misc_feature 1..21: note = n-mer motif encoding polynucleotide
cagactgatggtcctaatttt

SEQ ID NO: 3303 - DNA, 21 bp, synthetic construct
  source 1..21: mol_type = other DNA
  misc_feature 1..21: note = n-mer motif encoding polynucleotide
acgacgactaatgtgaatttt

SEQ ID NO: 3304 - DNA, 21 bp, synthetic construct
  misc_feature 1..21: note = n-mer motif encoding polynucleotide
  source 1..21: mol_type = other DNA
aacatgaccaacgaaaacgga

SEQ ID NO: 3305 - DNA, 21 bp, synthetic construct
  misc_feature 1..21: note = n-mer motif encoding polynucleotide
  source 1..21: mol_type = other DNA
gggtatagtccttcgacgccg

SEQ ID NO: 3306 - DNA, 21 bp, synthetic construct
  source 1..21: mol_type = other DNA
  misc_feature 1..21: note = n-mer motif encoding polynucleotide
ttgcaggttacggttcataat

SEQ ID NO: 3307 - DNA, 21 bp, synthetic construct
  source 1..21: mol_type = other DNA
  misc_feature 1..21: note = n-mer motif encoding polynucleotide
gatctgacgcatgttcatcgt

SEQ ID NO: 3308 - DNA, 21 bp, synthetic construct
  source 1..21: mol_type = other DNA
  misc_feature 1..21: note = n-mer motif encoding polynucleotide
acggagcttagtgagtatact

SEQ ID NO: 3309 - DNA, 21 bp, synthetic construct
  source 1..21: mol_type = other DNA
  misc_feature 1..21: note = n-mer motif encoding polynucleotide
atgacagtcgccagtactagc

SEQ ID NO: 3310 - DNA, 21 bp, synthetic construct
  misc_feature 1..21: note = n-mer motif encoding polynucleotide
  source 1..21: mol_type = other DNA
agcagtcaagcccacggccca

SEQ ID NO: 3311 - DNA, 21 bp, synthetic construct
  source 1..21: mol_type = other DNA
  misc_feature 1..21: note = n-mer motif encoding polynucleotide
accagaagcccgaacgaagac

SEQ ID NO: 3312 - DNA, 21 bp, synthetic construct
  source 1..21: mol_type = other DNA
  misc_feature 1..21: note = n-mer motif encoding polynucleotide
gataataataagcatggtact

SEQ ID NO: 3313 - DNA, 21 bp, synthetic construct
  misc_feature 1..21: note = n-mer motif encoding polynucleotide
  source 1..21: mol_type = other DNA
agggagattgttcatagtaat

SEQ ID NO: 3314 - DNA, 21 bp, synthetic construct
  source 1..21: mol_type = other DNA
  misc_feature 1..21: note = n-mer motif encoding polynucleotide
cggaaacttgaactcgaccta

SEQ ID NO: 3315 - DNA, 21 bp, synthetic construct
  misc_feature 1..21: note = n-mer motif encoding polynucleotide
  source 1..21: mol_type = other DNA
atctacgaaaccgtaaccttg

SEQ ID NO: 3316 - DNA, 21 bp, synthetic construct
  misc_feature 1..21: note = n-mer motif encoding polynucleotide
  source 1..21: mol_type = other DNA
aatagtggtagtacgagtttt

SEQ ID NO: 3317 - DNA, 21 bp, synthetic construct
  misc_feature 1..21: note = n-mer motif encoding polynucleotide
  source 1..21: mol_type = other DNA
ccaagtacgaacgaaagccgc

SEQ ID NO: 3318 - DNA, 21 bp, synthetic construct
  source 1..21: mol_type = other DNA
  misc_feature 1..21: note = n-mer motif encoding polynucleotide
caagccgacctcaggtacaaa

SEQ ID NO: 3319 - DNA, 21 bp, synthetic construct
  misc_feature 1..21: note = n-mer motif encoding polynucleotide
  source 1..21: mol_type = other DNA
gatcagccggggtatgtgcgt

SEQ ID NO: 3320 - DNA, 21 bp, synthetic construct
  misc_feature 1..21: note = n-mer motif encoding polynucleotide
  source 1..21: mol_type = other DNA
gatgctatgcttgctcatccg

SEQ ID NO: 3321 - DNA, 21 bp, synthetic construct
  source 1..21: mol_type = other DNA
  misc_feature 1..21: note = n-mer motif encoding polynucleotide
acacgtcacgacggcagtacg

SEQ ID NO: 3322 - DNA, 21 bp, synthetic construct
  misc_feature 1..21: note = n-mer motif encoding polynucleotide
  source 1..21: mol_type = other DNA
ctggcgaatatgagtgcgccg

SEQ ID NO: 3323 - DNA, 21 bp, synthetic construct
  source 1..21: mol_type = other DNA
  misc_feature 1..21: note = n-mer motif encoding polynucleotide
actggtcatccgccggcggcg

SEQ ID NO: 3324 - DNA, 21 bp, synthetic construct
  source 1..21: mol_type = other DNA
  misc_feature 1..21: note = n-mer motif encoding polynucleotide
tcgagtattagtctgcggtat

SEQ ID NO: 3325 - DNA, 21 bp, synthetic construct
  source 1..21: mol_type = other DNA
  misc_feature 1..21: note = n-mer motif encoding polynucleotide
atgcacgtcgacaaaacgagt

SEQ ID NO: 3326 - DNA, 21 bp, synthetic construct
  source 1..21: mol_type = other DNA
  misc_feature 1..21: note = n-mer motif encoding polynucleotide
gggagtgattctaagcatcct

SEQ ID NO: 3327 - DNA, 21 bp, synthetic construct
  misc_feature 1..21: note = n-mer motif encoding polynucleotide
  source 1..21: mol_type = other DNA
ggagaaagctcctcaataagc

SEQ ID NO: 3328 - DNA, 21 bp, synthetic construct
  source 1..21: mol_type = other DNA
  misc_feature 1..21: note = n-mer motif encoding polynucleotide
gtcgtccactcacacagtgaa

SEQ ID NO: 3329 - DNA, 21 bp, synthetic construct
  misc_feature 1..21: note = n-mer motif encoding polynucleotide
  source 1..21: mol_type = other DNA
agtgtgcgggcgcatgttttg

SEQ ID NO: 3330 - DNA, 21 bp, synthetic construct
  source 1..21: mol_type = other DNA
  misc_feature 1..21: note = n-mer motif encoding polynucleotide
gcggatggggctaagtctgct

SEQ ID NO: 3331 - DNA, 21 bp, synthetic construct
  source 1..21: mol_type = other DNA
  misc_feature 1..21: note = n-mer motif encoding polynucleotide
ggggaagcacgccgagaagcc

SEQ ID NO: 3332 - DNA, 21 bp, synthetic construct
  misc_feature 1..21: note = n-mer motif encoding polynucleotide
  source 1..21: mol_type = other DNA
tttaatgctacggtggtgcat

SEQ ID NO: 3333 - DNA, 21 bp, synthetic construct
  source 1..21: mol_type = other DNA
  misc_feature 1..21: note = n-mer motif encoding polynucleotide
tggacggaagggggctcagga

SEQ ID NO: 3334 - DNA, 21 bp, synthetic construct
  source 1..21: mol_type = other DNA
  misc_feature 1..21: note = n-mer motif encoding polynucleotide
gattcttcttatacgcatccg

SEQ ID NO: 3335 - DNA, 21 bp, synthetic construct
  source 1..21: mol_type = other DNA
  misc_feature 1..21: note = n-mer motif encoding polynucleotide
ttcccaagtagggacaacgta

SEQ ID NO: 3336 - DNA, 21 bp, synthetic construct
  source 1..21: mol_type = other DNA
  misc_feature 1..21: note = n-mer motif encoding polynucleotide
gccatcacgcacatcggtaca

SEQ ID NO: 3337 - DNA, 21 bp, synthetic construct
  source 1..21: mol_type = other DNA
  misc_feature 1..21: note = n-mer motif encoding polynucleotide
gcttttaagtcgggtagtatt

SEQ ID NO: 3338 - DNA, 21 bp, synthetic construct
  misc_feature 1..21: note = n-mer motif encoding polynucleotide
  source 1..21: mol_type = other DNA
atgtcaaacgcctcctacata

SEQ ID NO: 3339 - DNA, 21 bp, synthetic construct
  misc_feature 1..21: note = n-mer motif encoding polynucleotide
  source 1..21: mol_type = other DNA
gcggagaggaatgataggacg

SEQ ID NO: 3340 - DNA, 21 bp, synthetic construct
  source 1..21: mol_type = other DNA
  misc_feature 1..21: note = n-mer motif encoding polynucleotide
acattagaaacaacccgcagc

SEQ ID NO: 3341 - DNA, 21 bp, synthetic construct
  misc_feature 1..21: note = n-mer motif encoding polynucleotide
  source 1..21: mol_type = other DNA
cgcttacacggctcagactcg

SEQ ID NO: 3342 - DNA, 21 bp, synthetic construct
  misc_feature 1..21: note = n-mer motif encoding polynucleotide
  source 1..21: mol_type = other DNA
tatgaggggcatatgaatact

SEQ ID NO: 3343 - DNA, 21 bp, synthetic construct
  source 1..21: mol_type = other DNA
  misc_feature 1..21: note = n-mer motif encoding polynucleotide
tctgtgacgactaatctgatg

SEQ ID NO: 3344 - DNA, 21 bp, synthetic construct
  misc_feature 1..21: note = n-mer motif encoding polynucleotide
  source 1..21: mol_type = other DNA
ttgcgtgatcagactagtatg

SEQ ID NO: 3345 - DNA, 21 bp, synthetic construct
  misc_feature 1..21: note = n-mer motif encoding polynucleotide
  source 1..21: mol_type = other DNA
cccgccagtcacagcgcggga

SEQ ID NO: 3346 - DNA, 21 bp, synthetic construct
  source 1..21: mol_type = other DNA
  misc_feature 1..21: note = n-mer motif encoding polynucleotide
gtggttgagaatttgaggcag

SEQ ID NO: 3347 - DNA, 21 bp, synthetic construct
  misc_feature 1..21: note = n-mer motif encoding polynucleotide
  source 1..21: mol_type = other DNA
caacaatcacaaaactctata

SEQ ID NO: 3348 - DNA, 21 bp, synthetic construct
  source 1..21: mol_type = other DNA
  misc_feature 1..21: note = n-mer motif encoding polynucleotide
cttgttgatacggataggaat

SEQ ID NO: 3349 - DNA, 21 bp, synthetic construct
  source 1..21: mol_type = other DNA
  misc_feature 1..21: note = n-mer motif encoding polynucleotide
aacgaaatgggaaactacgtc

SEQ ID NO: 3350 - DNA, 21 bp, synthetic construct
  misc_feature 1..21: note = n-mer motif encoding polynucleotide
  source 1..21: mol_type = other DNA
tccaccgacccccgatactca

SEQ ID NO: 3351 - DNA, 21 bp, synthetic construct
  source 1..21: mol_type = other DNA
  misc_feature 1..21: note = n-mer motif encoding polynucleotide
actaatggtatttatcagcct

SEQ ID NO: 3352 - DNA, 21 bp, synthetic construct
  source 1..21: mol_type = other DNA
  misc_feature 1..21: note = n-mer motif encoding polynucleotide
tgggtaaacagtgtgggcaac

SEQ ID NO: 3353 - DNA, 21 bp, synthetic construct
  source 1..21: mol_type = other DNA
  misc_feature 1..21: note = n-mer motif encoding polynucleotide
ggggtatctaacaactctagc

SEQ ID NO: 3354 - DNA, 21 bp, synthetic construct
  source 1..21: mol_type = other DNA
  misc_feature 1..21: note = n-mer motif encoding polynucleotide
aatgttaatgcgcagagtagg

SEQ ID NO: 3355 - DNA, 21 bp, synthetic construct
  misc_feature 1..21: note = n-mer motif encoding polynucleotide
  source 1..21: mol_type = other DNA
acgacgccgcctttttctaat

SEQ ID NO: 3356 - DNA, 21 bp, synthetic construct
  misc_feature 1..21: note = n-mer motif encoding polynucleotide
  source 1..21: mol_type = other DNA
acaggcagctcccacaccaac

SEQ ID NO: 3357 - DNA, 21 bp, synthetic construct
  misc_feature 1..21: note = n-mer motif encoding polynucleotide
  source 1..21: mol_type = other DNA
tacgtcgacaaatcaatgaca

SEQ ID NO: 3358 - DNA, 21 bp, synthetic construct
  source 1..21: mol_type = other DNA
  misc_feature 1..21: note = n-mer motif encoding polynucleotide
ctaatcaaaaacaacatgctc

SEQ ID NO: 3359 - DNA, 21 bp, synthetic construct
  misc_feature 1..21: note = n-mer motif encoding polynucleotide
  source 1..21: mol_type = other DNA
gggggtacggggttgtcgaag

SEQ ID NO: 3360 - DNA, 21 bp, synthetic construct
  misc_feature 1..21: note = n-mer motif encoding polynucleotide
  source 1..21: mol_type = other DNA
gctcttcataatctgatgaat

SEQ ID NO: 3361 - DNA, 21 bp, synthetic construct
  source 1..21: mol_type = other DNA
  misc_feature 1..21: note = n-mer motif encoding polynucleotide
gtgcatgtgactaatgtgttg

SEQ ID NO: 3362 - DNA, 21 bp, synthetic construct
  misc_feature 1..21: note = n-mer motif encoding polynucleotide
  source 1..21: mol_type = other DNA
tcgacgacgcacccttccgaa

SEQ ID NO: 3363 - DNA, 21 bp, synthetic construct
  misc_feature 1..21: note = n-mer motif encoding polynucleotide
  source 1..21: mol_type = other DNA
agcgtaggtagtccaacacac

SEQ ID NO: 3364 - DNA, 21 bp, synthetic construct
  misc_feature 1..21: note = n-mer motif encoding polynucleotide
  source 1..21: mol_type = other DNA
atgagtaatgatttgcctggg

SEQ ID NO: 3365 - DNA, 21 bp, synthetic construct
  source 1..21: mol_type = other DNA
  misc_feature 1..21: note = n-mer motif encoding polynucleotide
ttctcgtcaaccgaagccaga

SEQ ID NO: 3366 - DNA, 21 bp, synthetic construct
  source 1..21: mol_type = other DNA
  misc_feature 1..21: note = n-mer motif encoding polynucleotide
gccggtcaccaacaactggcc

SEQ ID NO: 3367 - DNA, 21 bp, synthetic construct
  source 1..21: mol_type = other DNA
  misc_feature 1..21: note = n-mer motif encoding polynucleotide
ggtaccatattaccaaaccaa

SEQ ID NO: 3368 - DNA, 21 bp, synthetic construct
  source 1..21: mol_type = other DNA
  misc_feature 1..21: note = n-mer motif encoding polynucleotide
agcgcggtttctggtagcagc

SEQ ID NO: 3369 - DNA, 21 bp, synthetic construct
  source 1..21: mol_type = other DNA
  misc_feature 1..21: note = n-mer motif encoding polynucleotide
gaggtgtctagggatggtctg

SEQ ID NO: 3370 - DNA, 21 bp, synthetic construct
  misc_feature 1..21: note = n-mer motif encoding polynucleotide
  source 1..21: mol_type = other DNA
caatcactcaaagacggcact

SEQ ID NO: 3371 - DNA, 21 bp, synthetic construct
  source 1..21: mol_type = other DNA
  misc_feature 1..21: note = n-mer motif encoding polynucleotide
acgcgtgagggtaatcatgct

SEQ ID NO: 3372 - DNA, 21 bp, synthetic construct
  misc_feature 1..21: note = n-mer motif encoding polynucleotide
  source 1..21: mol_type = other DNA
gtggcgacccaaaaccttctt

SEQ ID NO: 3373 - DNA, 21 bp, synthetic construct
  source 1..21: mol_type = other DNA
  misc_feature 1..21: note = n-mer motif encoding polynucleotide
gccgaaatgacgcaccgcctc

SEQ ID NO: 3374 - DNA, 21 bp, synthetic construct
  source 1..21: mol_type = other DNA
  misc_feature 1..21: note = n-mer motif encoding polynucleotide
caacggccagacccgcttaaa

SEQ ID NO: 3375 - DNA, 21 bp, synthetic construct
  source 1..21: mol_type = other DNA
  misc_feature 1..21: note = n-mer motif encoding polynucleotide
gaacacatctctagctacgga

SEQ ID NO: 3376 - DNA, 21 bp, synthetic construct
  misc_feature 1..21: note = n-mer motif encoding polynucleotide
  source 1..21: mol_type = other DNA
caaaaaagcaacgaccaaaac

SEQ ID NO: 3377 - DNA, 21 bp, synthetic construct
  source 1..21: mol_type = other DNA
  misc_feature 1..21: note = n-mer motif encoding polynucleotide
aatcttgtgatgagtgggacg

SEQ ID NO: 3378 - DNA, 21 bp, synthetic construct
  misc_feature 1..21: note = n-mer motif encoding polynucleotide
  source 1..21: mol_type = other DNA
ggagcgggacaatctcacgtg

SEQ ID NO: 3379 - DNA, 21 bp, synthetic construct
  source 1..21: mol_type = other DNA
  misc_feature 1..21: note = n-mer motif encoding polynucleotide
ctcaaccacacaatgcccctc

SEQ ID NO: 3380 - DNA, 21 bp, synthetic construct
  source 1..21: mol_type = other DNA
  misc_feature 1..21: note = n-mer motif encoding polynucleotide
gtatcacaatcacacgacgtg

SEQ ID NO: 3381 - DNA, 21 bp, synthetic construct
  source 1..21: mol_type = other DNA
  misc_feature 1..21: note = n-mer motif encoding polynucleotide
gctaattctgctactaatcag

SEQ ID NO: 3382 - DNA, 21 bp, synthetic construct
  misc_feature 1..21: note = n-mer motif encoding polynucleotide
  source 1..21: mol_type = other DNA
ggcacaggaggtaaccgagaa

SEQ ID NO: 3383 - DNA, 21 bp, synthetic construct
  source 1..21: mol_type = other DNA
  misc_feature 1..21: note = n-mer motif encoding polynucleotide
gcgaagtcgtcgattattttg

SEQ ID NO: 3384 - DNA, 21 bp, synthetic construct
  misc_feature 1..21: note = n-mer motif encoding polynucleotide
  source 1..21: mol_type = other DNA
ggaggaacagcccttgggagc

SEQ ID NO: 3385 - DNA, 21 bp, synthetic construct
  source 1..21: mol_type = other DNA
  misc_feature 1..21: note = n-mer motif encoding polynucleotide
aacaaagtagaatctgaccca

SEQ ID NO: 3386 - DNA, 21 bp, synthetic construct
  source 1..21: mol_type = other DNA
  misc_feature 1..21: note = n-mer motif encoding polynucleotide
aactcgaaacaacccgacgtc

SEQ ID NO: 3387 - DNA, 21 bp, synthetic construct
  source 1..21: mol_type = other DNA
  misc_feature 1..21: note = n-mer motif encoding polynucleotide
agttatgctgatcgtcggctg

SEQ ID NO: 3388 - DNA, 21 bp, synthetic construct
  source 1..21: mol_type = other DNA
  misc_feature 1..21: note = n-mer motif encoding polynucleotide
aatgtgaatccgaatgggccg

SEQ ID NO: 3389 - DNA, 21 bp, synthetic construct
  misc_feature 1..21: note = n-mer motif encoding polynucleotide
  source 1..21: mol_type = other DNA
gaacacaactcaaaaacttac

SEQ ID NO: 3390 - DNA, 21 bp, synthetic construct
  misc_feature 1..21: note = n-mer motif encoding polynucleotide
  source 1..21: mol_type = other DNA
acccaaggatctaacaccaca

SEQ ID NO: 3391 - DNA, 21 bp, synthetic construct
  misc_feature 1..21: note = n-mer motif encoding polynucleotide
  source 1..21: mol_type = other DNA
agcaacgtatcagcttacgca

SEQ ID NO: 3392 - DNA, 21 bp, synthetic construct
  misc_feature 1..21: note = n-mer motif encoding polynucleotide
  source 1..21: mol_type = other DNA
gcgtacagtgacagcgcccgc

SEQ ID NO: 3393 - DNA, 21 bp, synthetic construct
  misc_feature 1..21: note = n-mer motif encoding polynucleotide
  source 1..21: mol_type = other DNA
gggtcgcaatacgcgaaccgc

SEQ ID NO: 3394 - DNA, 21 bp, synthetic construct
  misc_feature 1..21: note = n-mer motif encoding polynucleotide
  source 1..21: mol_type = other DNA
acaatgagcgtaactctggaa

SEQ ID NO: 3395 - DNA, 21 bp, synthetic construct
  misc_feature 1..21: note = n-mer motif encoding polynucleotide
  source 1..21: mol_type = other DNA
cagacgactattctggctgct

SEQ ID NO: 3396 - DNA, 21 bp, synthetic construct
  misc_feature 1..21: note = n-mer motif encoding polynucleotide
  source 1..21: mol_type = other DNA
ttgctccaatccatagtggta

SEQ ID NO: 3397 - DNA, 21 bp, synthetic construct
  misc_feature 1..21: note = n-mer motif encoding polynucleotide
  source 1..21: mol_type = other DNA
gttcacgctaacgctacatta

SEQ ID NO: 3398 - DNA, 21 bp, synthetic construct
  source 1..21: mol_type = other DNA
  misc_feature 1..21: note = n-mer motif encoding polynucleotide
aacaaaacaaacgccgactac

SEQ ID NO: 3399 - DNA, 21 bp, synthetic construct
  source 1..21: mol_type = other DNA
  misc_feature 1..21: note = n-mer motif encoding polynucleotide
aactacgacaccggcgccaaa

SEQ ID NO: 3400 - DNA, 21 bp, synthetic construct
  misc_feature 1..21: note = n-mer motif encoding polynucleotide
  source 1..21: mol_type = other DNA
gtctaccacaaccgcgacgtt

SEQ ID NO: 3401 - DNA, 21 bp, synthetic construct
  source 1..21: mol_type = other DNA
  misc_feature 1..21: note = n-mer motif encoding polynucleotide
gattctgctccgaggtctatt

SEQ ID NO: 3402 - DNA, 21 bp, synthetic construct
  misc_feature 1..21: note = n-mer motif encoding polynucleotide
  source 1..21: mol_type = other DNA
ttgattgcgaatctgagtaat

SEQ ID NO: 3403 - DNA, 21 bp, synthetic construct
  source 1..21: mol_type = other DNA
  misc_feature 1..21: note = n-mer motif encoding polynucleotide
ccgcaagacgtccgccaaaca

SEQ ID NO: 3404 - DNA, 21 bp, synthetic construct
  source 1..21: mol_type = other DNA
  misc_feature 1..21: note = n-mer motif encoding polynucleotide
acaatgacagcaatagcaatg

SEQ ID NO: 3405 - DNA, 21 bp, synthetic construct
  misc_feature 1..21: note = n-mer motif encoding polynucleotide
  source 1..21: mol_type = other DNA
acatacgcctctactgaagcg

SEQ ID NO: 3406 - DNA, 21 bp, synthetic construct
  misc_feature 1..21: note = n-mer motif encoding polynucleotide
  source 1..21: mol_type = other DNA
cctcacgccaacggagtgaca

SEQ ID NO: 3407 - DNA, 21 bp, synthetic construct
  misc_feature 1..21: note = n-mer motif encoding polynucleotide
  source 1..21: mol_type = other DNA
cgggctgatgtttcttggtct

SEQ ID NO: 3408 - DNA, 21 bp, synthetic construct
  source 1..21: mol_type = other DNA
  misc_feature 1..21: note = n-mer motif encoding polynucleotide
ctgacgcacatgaccggaacc

SEQ ID NO: 3409 - DNA, 21 bp, synthetic construct
  source 1..21: mol_type = other DNA
  misc_feature 1..21: note = n-mer motif encoding polynucleotide
gcaaacgactctgccaaaaca

SEQ ID NO: 3410 - DNA, 21 bp, synthetic construct
  misc_feature 1..21: note = n-mer motif encoding polynucleotide
  source 1..21: mol_type = other DNA
gctaattctgggttgcataat

SEQ ID NO: 3411 - DNA, 21 bp, synthetic construct
  misc_feature 1..21: note = n-mer motif encoding polynucleotide
  source 1..21: mol_type = other DNA
aacgtgggcaccgacagagac

SEQ ID NO: 3412 - DNA, 21 bp, synthetic construct
  misc_feature 1..21: note = n-mer motif encoding polynucleotide
  source 1..21: mol_type = other DNA
gtcggaacaacctcgaacggc

SEQ ID NO: 3413 - DNA, 21 bp, synthetic construct
  source 1..21: mol_type = other DNA
  misc_feature 1..21: note = n-mer motif encoding polynucleotide
ggagttcttgggatactggtc

SEQ ID NO: 3414 - DNA, 21 bp, synthetic construct
  misc_feature 1..21: note = n-mer motif encoding polynucleotide
  source 1..21: mol_type = other DNA
cgaatcaacgcagcaatcgac

SEQ ID NO: 3415 - DNA, 21 bp, synthetic construct
  misc_feature 1..21: note = n-mer motif encoding polynucleotide
  source 1..21: mol_type = other DNA
cccgacactcgcccatccata

SEQ ID NO: 3416 - DNA, 21 bp, synthetic construct
  source 1..21: mol_type = other DNA
  misc_feature 1..21: note = n-mer motif encoding polynucleotide
ggtgaatcacgtacaaacatg

SEQ ID NO: 3417 - DNA, 21 bp, synthetic construct
  misc_feature 1..21: note = n-mer motif encoding polynucleotide
  source 1..21: mol_type = other DNA
attttgcttgctcagtctgct

SEQ ID NO: 3418 - DNA, 21 bp, synthetic construct
  source 1..21: mol_type = other DNA
  misc_feature 1..21: note = n-mer motif encoding polynucleotide
tataatagggataatggttct

SEQ ID NO: 3419 - DNA, 21 bp, synthetic construct
  source 1..21: mol_type = other DNA
  misc_feature 1..21: note = n-mer motif encoding polynucleotide
tggaatagtccgggtgaggcg

SEQ ID NO: 3420 - DNA, 21 bp, synthetic construct
  misc_feature 1..21: note = n-mer motif encoding polynucleotide
  source 1..21: mol_type = other DNA
ctgttgggggctcatcagccg

SEQ ID NO: 3421 - DNA, 21 bp, synthetic construct
  misc_feature 1..21: note = n-mer motif encoding polynucleotide
  source 1..21: mol_type = other DNA
attggtaaggatagtgttccg

SEQ ID NO: 3422 - DNA, 21 bp, synthetic construct
  source 1..21: mol_type = other DNA
  misc_feature 1..21: note = n-mer motif encoding polynucleotide
acgcgggagagtctggtggat

SEQ ID NO: 3423 - DNA, 21 bp, synthetic construct
  misc_feature 1..21: note = n-mer motif encoding polynucleotide
  source 1..21: mol_type = other DNA
gcctctaaccacctacaagcc

SEQ ID NO: 3424 - DNA, 21 bp, synthetic construct
  misc_feature 1..21: note = n-mer motif encoding polynucleotide
  source 1..21: mol_type = other DNA
aatcttcagacgggtaaggct

SEQ ID NO: 3425 - DNA, 21 bp, synthetic construct
  misc_feature 1..21: note = n-mer motif encoding polynucleotide
  source 1..21: mol_type = other DNA
actgtaggatcctcatacgct

SEQ ID NO: 3426 - DNA, 21 bp, synthetic construct
  misc_feature 1..21: note = n-mer motif encoding polynucleotide
  source 1..21: mol_type = other DNA
gacactaacggaataaaatca

SEQ ID NO: 3427 - DNA, 21 bp, synthetic construct
  source 1..21: mol_type = other DNA
  misc_feature 1..21: note = n-mer motif encoding polynucleotide
agtctgcggatggagaatagt

SEQ ID NO: 3428 - DNA, 21 bp, synthetic construct
  misc_feature 1..21: note = n-mer motif encoding polynucleotide
  source 1..21: mol_type = other DNA
actaagggtaataatctggtt

SEQ ID NO: 3429 - DNA, 21 bp, synthetic construct
  misc_feature 1..21: note = n-mer motif encoding polynucleotide
  source 1..21: mol_type = other DNA
catacgaatcagatgcagcct

SEQ ID NO: 3430 - DNA, 21 bp, synthetic construct
  source 1..21: mol_type = other DNA
  misc_feature 1..21: note = n-mer motif encoding polynucleotide
aacggcaactacgacggcgcg

SEQ ID NO: 3431 - DNA, 21 bp, synthetic construct
  source 1..21: mol_type = other DNA
  misc_feature 1..21: note = n-mer motif encoding polynucleotide
gaggcgcataatcgtggtaat

SEQ ID NO: 3432 - DNA, 21 bp, synthetic construct
  source 1..21: mol_type = other DNA
  misc_feature 1..21: note = n-mer motif encoding polynucleotide
gggacggttaactcaagtgca

SEQ ID NO: 3433 - DNA, 21 bp, synthetic construct
  source 1..21: mol_type = other DNA
  misc_feature 1..21: note = n-mer motif encoding polynucleotide
gggccgacgatgaatcataat

SEQ ID NO: 3434 - DNA, 21 bp, synthetic construct
  misc_feature 1..21: note = n-mer motif encoding polynucleotide
  source 1..21: mol_type = other DNA
gtacccaacaacaacacttcg

SEQ ID NO: 3435 - DNA, 21 bp, synthetic construct
  source 1..21: mol_type = other DNA
  misc_feature 1..21: note = n-mer motif encoding polynucleotide
gtttctaacaaatctggaagt

SEQ ID NO: 3436 - DNA, 21 bp, synthetic construct
  misc_feature 1..21: note = n-mer motif encoding polynucleotide
  source 1..21: mol_type = other DNA
tggggagtcagtaactcagca

SEQ ID NO: 3437 - DNA, 21 bp, synthetic construct
  misc_feature 1..21: note = n-mer motif encoding polynucleotide
  source 1..21: mol_type = other DNA
gtctctaacgtcctctacagc

SEQ ID NO: 3438 - DNA, 21 bp, synthetic construct
  source 1..21: mol_type = other DNA
  misc_feature 1..21: note = n-mer motif encoding polynucleotide
gccggccaaaacagtgtgggc

SEQ ID NO: 3439 - DNA, 21 bp, synthetic construct
  source 1..21: mol_type = other DNA
  misc_feature 1..21: note = n-mer motif encoding polynucleotide
ggtacgagtctggagaatagg

SEQ ID NO: 3440 - DNA, 21 bp, synthetic construct
  source 1..21: mol_type = other DNA
  misc_feature 1..21: note = n-mer motif encoding polynucleotide
cagatgaatattcatgataag

SEQ ID NO: 3441 - DNA, 21 bp, synthetic construct
  misc_feature 1..21: note = n-mer motif encoding polynucleotide
  source 1..21: mol_type = other DNA
cctcaactaagcggcacagcg

SEQ ID NO: 3442 - DNA, 21 bp, synthetic construct
  misc_feature 1..21: note = n-mer motif encoding polynucleotide
  source 1..21: mol_type = other DNA
agttcgactccgcaggatact

SEQ ID NO: 3443 - DNA, 21 bp, synthetic construct
  misc_feature 1..21: note = n-mer motif encoding polynucleotide
  source 1..21: mol_type = other DNA
gtgcaggggcagaccggctgg

SEQ ID NO: 3444 - DNA, 21 bp, synthetic construct
  misc_feature 1..21: note = n-mer motif encoding polynucleotide
  source 1..21: mol_type = other DNA
ggtctgacgggtgatttggtt

SEQ ID NO: 3445 - DNA, 21 bp, synthetic construct
  misc_feature 1..21: note = n-mer motif encoding polynucleotide
  source 1..21: mol_type = other DNA
aaccaccccgcaccaagctca

SEQ ID NO: 3446 - DNA, 21 bp, synthetic construct
  misc_feature 1..21: note = n-mer motif encoding polynucleotide
  source 1..21: mol_type = other DNA
aaagaaaaaaccacccgcgaa

SEQ ID NO: 3447 - DNA, 21 bp, synthetic construct
  misc_feature 1..21: note = n-mer motif encoding polynucleotide
  source 1..21: mol_type = other DNA
actactaatccgcagacgcag

SEQ ID NO: 3448 - DNA, 21 bp, synthetic construct
  misc_feature 1..21: note = n-mer motif encoding polynucleotide
  source 1..21: mol_type = other DNA
ggaggtgaacacgcaagaaac

SEQ ID NO: 3449 - DNA, 21 bp, synthetic construct
  misc_feature 1..21: note = n-mer motif encoding polynucleotide
  source 1..21: mol_type = other DNA
acgaccgaagctgttgtagca

SEQ ID NO: 3450 - DNA, 21 bp, synthetic construct
  source 1..21: mol_type = other DNA
  misc_feature 1..21: note = n-mer motif encoding polynucleotide
caaaacagtgacctcgccagc

SEQ ID NO: 3451 - DNA, 21 bp, synthetic construct
  misc_feature 1..21: note = n-mer motif encoding polynucleotide
  source 1..21: mol_type = other DNA
tactctacagaagcacgagtc

SEQ ID NO: 3452 - DNA, 21 bp, synthetic construct
  misc_feature 1..21: note = n-mer motif encoding polynucleotide
  source 1..21: mol_type = other DNA
accggacaagcgggcggatcg

SEQ ID NO: 3453 - DNA, 21 bp, synthetic construct
  source 1..21: mol_type = other DNA
  misc_feature 1..21: note = n-mer motif encoding polynucleotide
acttcgtctaatctttatgtg

SEQ ID NO: 3454 - DNA, 21 bp, synthetic construct
  source 1..21: mol_type = other DNA
  misc_feature 1..21: note = n-mer motif encoding polynucleotide
acggctcgtgcgattgatatg

SEQ ID NO: 3455 - DNA, 21 bp, synthetic construct
  source 1..21: mol_type = other DNA
  misc_feature 1..21: note = n-mer motif encoding polynucleotide
caggagtctaataggggggtg

SEQ ID NO: 3456 - DNA, 21 bp, synthetic construct
  source 1..21: mol_type = other DNA
  misc_feature 1..21: note = n-mer motif encoding polynucleotide
agtatcggattctcagtaggc

SEQ ID NO: 3457 - DNA, 21 bp, synthetic construct
  source 1..21: mol_type = other DNA
  misc_feature 1..21: note = n-mer motif encoding polynucleotide
gagcggagtacgcataatgtt

SEQ ID NO: 3458 - DNA, 21 bp, synthetic construct
  source 1..21: mol_type = other DNA
  misc_feature 1..21: note = n-mer motif encoding polynucleotide
gcaaaccacgacaacatcgtg

SEQ ID NO: 3459 - DNA, 21 bp, synthetic construct
  source 1..21: mol_type = other DNA
  misc_feature 1..21: note = n-mer motif encoding polynucleotide
tgggctatgaataatgtgccg

SEQ ID NO: 3460 - DNA, 21 bp, synthetic construct
  source 1..21: mol_type = other DNA
  misc_feature 1..21: note = n-mer motif encoding polynucleotide
tatattgctgcgggtgagcag

SEQ ID NO: 3461 - DNA, 21 bp, synthetic construct
  misc_feature 1..21: note = n-mer motif encoding polynucleotide
  source 1..21: mol_type = other DNA
agttcgaatacttctggtagt

SEQ ID NO: 3462 - DNA, 21 bp, synthetic construct
  source 1..21: mol_type = other DNA
  misc_feature 1..21: note = n-mer motif encoding polynucleotide
atggggaagcatgagggtctt

SEQ ID NO: 3463 - DNA, 21 bp, synthetic construct
  misc_feature 1..21: note = n-mer motif encoding polynucleotide
  source 1..21: mol_type = other DNA
gtgcttactcatctgccgacg

SEQ ID NO: 3464 - DNA, 21 bp, synthetic construct
  misc_feature 1..21: note = n-mer motif encoding polynucleotide
  source 1..21: mol_type = other DNA
gaaatgggtaaccaataccca

SEQ ID NO: 3465 - DNA, 21 bp, synthetic construct
  misc_feature 1..21: note = n-mer motif encoding polynucleotide
  source 1..21: mol_type = other DNA
agtctgcgtccaaccctacct

SEQ ID NO: 3466 - DNA, 21 bp, synthetic construct
  misc_feature 1..21: note = n-mer motif encoding polynucleotide
  source 1..21: mol_type = other DNA
tcggctaacttatacaaacaa

SEQ ID NO: 3467 - DNA, 21 bp, synthetic construct
  misc_feature 1..21: note = n-mer motif encoding polynucleotide
  source 1..21: mol_type = other DNA
caaaacgacagaaaaccggac

SEQ ID NO: 3468 - DNA, 21 bp, synthetic construct
  misc_feature 1..21: note = n-mer motif encoding polynucleotide
  source 1..21: mol_type = other DNA
attatttcgggtattacggtg

SEQ ID NO: 3469 - DNA, 21 bp, synthetic construct
  misc_feature 1..21: note = n-mer motif encoding polynucleotide
  source 1..21: mol_type = other DNA
ccatccgaaatgagggccgta

SEQ ID NO: 3470 - DNA, 21 bp, synthetic construct
  source 1..21: mol_type = other DNA
  misc_feature 1..21: note = n-mer motif encoding polynucleotide
ttggttacgcagacgccgaat

SEQ ID NO: 3471 - DNA, 21 bp, synthetic construct
  source 1..21: mol_type = other DNA
  misc_feature 1..21: note = n-mer motif encoding polynucleotide
attgcgcagaatgagacgtat

SEQ ID NO: 3472 - DNA, 21 bp, synthetic construct
  misc_feature 1..21: note = n-mer motif encoding polynucleotide
  source 1..21: mol_type = other DNA
ccatacttaagaaacatggcg

SEQ ID NO: 3473 - DNA, 21 bp, synthetic construct
  misc_feature 1..21: note = n-mer motif encoding polynucleotide
  source 1..21: mol_type = other DNA
ggcgtgaacacaaaaatcgaa

SEQ ID NO: 3474 - DNA, 21 bp, synthetic construct
  source 1..21: mol_type = other DNA
  misc_feature 1..21: note = n-mer motif encoding polynucleotide
tactcttctgaaatgagcgaa

SEQ ID NO: 3475 - DNA, 21 bp, synthetic construct
  source 1..21: mol_type = other DNA
  misc_feature 1..21: note = n-mer motif encoding polynucleotide
ttagaaaacccaacaccagca

SEQ ID NO: 3476 - DNA, 21 bp, synthetic construct
  misc_feature 1..21: note = n-mer motif encoding polynucleotide
  source 1..21: mol_type = other DNA
ggtgttatgtctaatgctact

SEQ ID NO: 3477 - DNA, 21 bp, synthetic construct
  source 1..21: mol_type = other DNA
  misc_feature 1..21: note = n-mer motif encoding polynucleotide
gcccacactgcattagcgggg

SEQ ID NO: 3478 - DNA, 21 bp, synthetic construct
  source 1..21: mol_type = other DNA
  misc_feature 1..21: note = n-mer motif encoding polynucleotide
cctgttgtgagggatcgttct

SEQ ID NO: 3479 - DNA, 21 bp, synthetic construct
  source 1..21: mol_type = other DNA
  misc_feature 1..21: note = n-mer motif encoding polynucleotide
tctgcgggtatggtgagtctg

SEQ ID NO: 3480 - DNA, 21 bp, synthetic construct
  misc_feature 1..21: note = n-mer motif encoding polynucleotide
  source 1..21: mol_type = other DNA
tcgggtgttaatagtgagcgt

SEQ ID NO: 3481 - DNA, 21 bp, synthetic construct
  misc_feature 1..21: note = n-mer motif encoding polynucleotide
  source 1..21: mol_type = other DNA
aatggggatgttactaatatg

SEQ ID NO: 3482 - DNA, 21 bp, synthetic construct
  misc_feature 1..21: note = n-mer motif encoding polynucleotide
  source 1..21: mol_type = other DNA
tctgttgtgcctacggataag

SEQ ID NO: 3483 - DNA, 21 bp, synthetic construct
  source 1..21: mol_type = other DNA
  misc_feature 1..21: note = n-mer motif encoding polynucleotide
agtaagggtgatcagcttaat

SEQ ID NO: 3484 - DNA, 21 bp, synthetic construct
  source 1..21: mol_type = other DNA
  misc_feature 1..21: note = n-mer motif encoding polynucleotide
gacggagaatcccgattatca

SEQ ID NO: 3485 - DNA, 21 bp, synthetic construct
  source 1..21: mol_type = other DNA
  misc_feature 1..21: note = n-mer motif encoding polynucleotide
ggtaatatgaatcatagtatt

SEQ ID NO: 3486 - DNA, 21 bp, synthetic construct
  misc_feature 1..21: note = n-mer motif encoding polynucleotide
  source 1..21: mol_type = other DNA
agtgggcatgcttctcagggt

SEQ ID NO: 3487 - DNA, 21 bp, synthetic construct
  misc_feature 1..21: note = n-mer motif encoding polynucleotide
  source 1..21: mol_type = other DNA
ggttggagtaataatgagttg

SEQ ID NO: 3488 - DNA, 21 bp, synthetic construct
  misc_feature 1..21: note = n-mer motif encoding polynucleotide
  source 1..21: mol_type = other DNA
ggtgtgcatactcatactgtt

SEQ ID NO: 3489 - DNA, 21 bp, synthetic construct
  misc_feature 1..21: note = n-mer motif encoding polynucleotide
  source 1..21: mol_type = other DNA
cacgtgacagtaacgttaaac

SEQ ID NO: 3490 - DNA, 21 bp, synthetic construct
  misc_feature 1..21: note = n-mer motif encoding polynucleotide
  source 1..21: mol_type = other DNA
acccgtggcaacgacatatca

SEQ ID NO: 3491 - DNA, 21 bp, synthetic construct
  misc_feature 1..21: note = n-mer motif encoding polynucleotide
  source 1..21: mol_type = other DNA
agcaaaggcggcgacatggtt

SEQ ID NO: 3492 - DNA, 21 bp, synthetic construct
  source 1..21: mol_type = other DNA
  misc_feature 1..21: note = n-mer motif encoding polynucleotide
acgcatggtgatcatattcag

SEQ ID NO: 3493 - DNA, 21 bp, synthetic construct
  misc_feature 1..21: note = n-mer motif encoding polynucleotide
  source 1..21: mol_type = other DNA
actacgaattctcatgcgatt

SEQ ID NO: 3494 - DNA, 21 bp, synthetic construct
  misc_feature 1..21: note = n-mer motif encoding polynucleotide
  source 1..21: mol_type = other DNA
gtcagaacagtccttcaacaa

SEQ ID NO: 3495 - DNA, 21 bp, synthetic construct
  source 1..21: mol_type = other DNA
  misc_feature 1..21: note = n-mer motif encoding polynucleotide
actgtgcgttcgcctcagccg

SEQ ID NO: 3496 - DNA, 21 bp, synthetic construct
  source 1..21: mol_type = other DNA
  misc_feature 1..21: note = n-mer motif encoding polynucleotide
aatacttatactgctggtaag

SEQ ID NO: 3497 - DNA, 21 bp, synthetic construct
  source 1..21: mol_type = other DNA
  misc_feature 1..21: note = n-mer motif encoding polynucleotide
attagtaatccggagaatacg

SEQ ID NO: 3498 - DNA, 21 bp, synthetic construct
  misc_feature 1..21: note = n-mer motif encoding polynucleotide
  source 1..21: mol_type = other DNA
atcgggtcgccgttggccaac

SEQ ID NO: 3499 - DNA, 21 bp, synthetic construct
  misc_feature 1..21: note = n-mer motif encoding polynucleotide
  source 1..21: mol_type = other DNA
tatacgggtactcttgttgtt

SEQ ID NO: 3500 - DNA, 21 bp, synthetic construct
  source 1..21: mol_type = other DNA
  misc_feature 1..21: note = n-mer motif encoding polynucleotide
gggcggcacacattagcggac

SEQ ID NO: 3501 - DNA, 21 bp, synthetic construct
  source 1..21: mol_type = other DNA
  misc_feature 1..21: note = n-mer motif encoding polynucleotide
actgatgggccgcgtctggct

SEQ ID NO: 3502 - DNA, 21 bp, synthetic construct
  misc_feature 1..21: note = n-mer motif encoding polynucleotide
  source 1..21: mol_type = other DNA
ggggcaggaaacctgggtacc

SEQ ID NO: 3503 - DNA, 21 bp, synthetic construct
  source 1..21: mol_type = other DNA
  misc_feature 1..21: note = n-mer motif encoding polynucleotide
ctgatgaatcgtaatgctcct

SEQ ID NO: 3504 - DNA, 21 bp, synthetic construct
  source 1..21: mol_type = other DNA
  misc_feature 1..21: note = n-mer motif encoding polynucleotide
aatgctatggcttctagtagg

SEQ ID NO: 3505 - DNA, 21 bp, synthetic construct
  misc_feature 1..21: note = n-mer motif encoding polynucleotide
  source 1..21: mol_type = other DNA
cagcatcgtgcgcaggatgtg

SEQ ID NO: 3506 - DNA, 21 bp, synthetic construct
  source 1..21: mol_type = other DNA
  misc_feature 1..21: note = n-mer motif encoding polynucleotide
aaaatagaaagcggaaccata

SEQ ID NO: 3507 - DNA, 21 bp, synthetic construct
  misc_feature 1..21: note = n-mer motif encoding polynucleotide
  source 1..21: mol_type = other DNA
actaattatcctgaggcgaat

SEQ ID NO: 3508 - DNA, 21 bp, synthetic construct
  misc_feature 1..21: note = n-mer motif encoding polynucleotide
  source 1..21: mol_type = other DNA
gtataccacggggtagccagc

SEQ ID NO: 3509 - DNA, 21 bp, synthetic construct
  source 1..21: mol_type = other DNA
  misc_feature 1..21: note = n-mer motif encoding polynucleotide
tccaacgtccacgtagtaaac

SEQ ID NO: 3510 - DNA, 21 bp, synthetic construct
  misc_feature 1..21: note = n-mer motif encoding polynucleotide
  source 1..21: mol_type = other DNA
acatacaccgacgggaacccc

SEQ ID NO: 3511 - DNA, 21 bp, synthetic construct
  misc_feature 1..21: note = n-mer motif encoding polynucleotide
  source 1..21: mol_type = other DNA
tttattgcgaatacgaatcct

SEQ ID NO: 3512 - DNA, 21 bp, synthetic construct
  misc_feature 1..21: note = n-mer motif encoding polynucleotide
  source 1..21: mol_type = other DNA
gacgccgggtacggccacgac

SEQ ID NO: 3513 - DNA, 21 bp, synthetic construct
  misc_feature 1..21: note = n-mer motif encoding polynucleotide
  source 1..21: mol_type = other DNA
ggtcttagtcggaatgatggt

SEQ ID NO: 3514 - DNA, 21 bp, synthetic construct
  misc_feature 1..21: note = n-mer motif encoding polynucleotide
  source 1..21: mol_type = other DNA
atgatgggcgcgacaacgaaa

SEQ ID NO: 3515 - DNA, 21 bp, synthetic construct
  source 1..21: mol_type = other DNA
  misc_feature 1..21: note = n-mer motif encoding polynucleotide
cccatcaacgtactcacgaca

SEQ ID NO: 3516 - DNA, 21 bp, synthetic construct
  misc_feature 1..21: note = n-mer motif encoding polynucleotide
  source 1..21: mol_type = other DNA
gccgtagaccaatcacgtttg

SEQ ID NO: 3517 - DNA, 21 bp, synthetic construct
  source 1..21: mol_type = other DNA
  misc_feature 1..21: note = n-mer motif encoding polynucleotide
aacgcttctacctacatggac

SEQ ID NO: 3518 - DNA, 21 bp, synthetic construct
  source 1..21: mol_type = other DNA
  misc_feature 1..21: note = n-mer motif encoding polynucleotide
acacaagcaggtcttgcgtca

SEQ ID NO: 3519 - DNA, 21 bp, synthetic construct
  source 1..21: mol_type = other DNA
  misc_feature 1..21: note = n-mer motif encoding polynucleotide
gcacaattcgaatcaggccga

SEQ ID NO: 3520 - DNA, 21 bp, synthetic construct
  source 1..21: mol_type = other DNA
  misc_feature 1..21: note = n-mer motif encoding polynucleotide
cggaatggtggtactacggat

SEQ ID NO: 3521 - DNA, 21 bp, synthetic construct
  misc_feature 1..21: note = n-mer motif encoding polynucleotide
  source 1..21: mol_type = other DNA
gctaatacgtataatgttcag

SEQ ID NO: 3522 - DNA, 21 bp, synthetic construct
  source 1..21: mol_type = other DNA
  misc_feature 1..21: note = n-mer motif encoding polynucleotide
tcgggtgttcatagtgagcgt

SEQ ID NO: 3523 - DNA, 21 bp, synthetic construct
  source 1..21: mol_type = other DNA
  misc_feature 1..21: note = n-mer motif encoding polynucleotide
aacaccggcaccacgagtgtc

SEQ ID NO: 3524 - DNA, 21 bp, synthetic construct
  source 1..21: mol_type = other DNA
  misc_feature 1..21: note = n-mer motif encoding polynucleotide
agtacgagtaatagtcatatg

SEQ ID NO: 3525 - DNA, 21 bp, synthetic construct
  misc_feature 1..21: note = n-mer motif encoding polynucleotide
  source 1..21: mol_type = other DNA
ggtgaacaacacaacgccccc

SEQ ID NO: 3526 - DNA, 21 bp, synthetic construct
  source 1..21: mol_type = other DNA
  misc_feature 1..21: note = n-mer motif encoding polynucleotide
gctcatcatatgacgacggag

SEQ ID NO: 3527 - DNA, 21 bp, synthetic construct
  misc_feature 1..21: note = n-mer motif encoding polynucleotide
  source 1..21: mol_type = other DNA
ttgatgactggtactgcgtcg

SEQ ID NO: 3528 - DNA, 21 bp, synthetic construct
  misc_feature 1..21: note = n-mer motif encoding polynucleotide
  source 1..21: mol_type = other DNA
gctgccggagccgactctcca

SEQ ID NO: 3529 - DNA, 21 bp, synthetic construct
  misc_feature 1..21: note = n-mer motif encoding polynucleotide
  source 1..21: mol_type = other DNA
gtgtctctgagttcgcctccg

SEQ ID NO: 3530 - DNA, 21 bp, synthetic construct
  source 1..21: mol_type = other DNA
  misc_feature 1..21: note = n-mer motif encoding polynucleotide
cgtgttgtagccggtcccaac

SEQ ID NO: 3531 - DNA, 21 bp, synthetic construct
  source 1..21: mol_type = other DNA
  misc_feature 1..21: note = n-mer motif encoding polynucleotide
gataagactgagatgctgcag

SEQ ID NO: 3532 - DNA, 21 bp, synthetic construct
  misc_feature 1..21: note = n-mer motif encoding polynucleotide
  source 1..21: mol_type = other DNA
gcacgagacgacacgatacaa

SEQ ID NO: 3533 - DNA, 21 bp, synthetic construct
  misc_feature 1..21: note = n-mer motif encoding polynucleotide
  source 1..21: mol_type = other DNA
ttacaccttgggttatcatct

SEQ ID NO: 3534 - DNA, 21 bp, synthetic construct
  source 1..21: mol_type = other DNA
  misc_feature 1..21: note = n-mer motif encoding polynucleotide
ctcgaaggacaacgggacgtc

SEQ ID NO: 3535 - DNA, 21 bp, synthetic construct
  misc_feature 1..21: note = n-mer motif encoding polynucleotide
  source 1..21: mol_type = other DNA
gcgtcgttgtcggctccggcg

SEQ ID NO: 3536 - DNA, 21 bp, synthetic construct
  source 1..21: mol_type = other DNA
  misc_feature 1..21: note = n-mer motif encoding polynucleotide
agcaaccctgggaaccacaac

SEQ ID NO: 3537 - DNA, 21 bp, synthetic construct
  source 1..21: mol_type = other DNA
  misc_feature 1..21: note = n-mer motif encoding polynucleotide
gggctgaattctaaggggact

SEQ ID NO: 3538 - DNA, 21 bp, synthetic construct
  source 1..21: mol_type = other DNA
  misc_feature 1..21: note = n-mer motif encoding polynucleotide
aaaacaccctcagcttcagaa

SEQ ID NO: 3539 - DNA, 21 bp, synthetic construct
  source 1..21: mol_type = other DNA
  misc_feature 1..21: note = n-mer motif encoding polynucleotide
gtgctggcgtcgactgagaag

SEQ ID NO: 3540 - DNA, 21 bp, synthetic construct
  source 1..21: mol_type = other DNA
  misc_feature 1..21: note = n-mer motif encoding polynucleotide
tcggtattgaacaaaccaaca

SEQ ID NO: 3541 - DNA, 21 bp, synthetic construct
  misc_feature 1..21: note = n-mer motif encoding polynucleotide
  source 1..21: mol_type = other DNA
cccggtaacggacaaagtccg

SEQ ID NO: 3542 - DNA, 21 bp, synthetic construct
  misc_feature 1..21: note = n-mer motif encoding polynucleotide
  source 1..21: mol_type = other DNA
atcttgatgggcgctaggaca

SEQ ID NO: 3543 - DNA, 21 bp, synthetic construct
  source 1..21: mol_type = other DNA
  misc_feature 1..21: note = n-mer motif encoding polynucleotide
gcactaccatcccactcctcc

SEQ ID NO: 3544 - DNA, 21 bp, synthetic construct
  misc_feature 1..21: note = n-mer motif encoding polynucleotide
  source 1..21: mol_type = other DNA
agggatcagactcatccgaat

SEQ ID NO: 3545 - DNA, 21 bp, synthetic construct
  source 1..21: mol_type = other DNA
  misc_feature 1..21: note = n-mer motif encoding polynucleotide
tctggtccgattcctgctgtt

SEQ ID NO: 3546 - DNA, 21 bp, synthetic construct
  misc_feature 1..21: note = n-mer motif encoding polynucleotide
  source 1..21: mol_type = other DNA
tacgtggacgacaacagtcgc

SEQ ID NO: 3547 - DNA, 21 bp, synthetic construct
  misc_feature 1..21: note = n-mer motif encoding polynucleotide
  source 1..21: mol_type = other DNA
ttgactcggggggtcgccgca

SEQ ID NO: 3548 - DNA, 21 bp, synthetic construct
  misc_feature 1..21: note = n-mer motif encoding polynucleotide
  source 1..21: mol_type = other DNA
tctgagaaggaggctcggctg

SEQ ID NO: 3549 - DNA, 21 bp, synthetic construct
  misc_feature 1..21: note = n-mer motif encoding polynucleotide
  source 1..21: mol_type = other DNA
tccacaacgcctcccttcaaa

SEQ ID NO: 3550 - DNA, 21 bp, synthetic construct
  source 1..21: mol_type = other DNA
  misc_feature 1..21: note = n-mer motif encoding polynucleotide
tactcgacaaccatgcttaac

SEQ ID NO: 3551 - DNA, 21 bp, synthetic construct
  misc_feature 1..21: note = n-mer motif encoding polynucleotide
  source 1..21: mol_type = other DNA
aaaaacggtgttataaacgac

SEQ ID NO: 3552 - DNA, 21 bp, synthetic construct
  source 1..21: mol_type = other DNA
  misc_feature 1..21: note = n-mer motif encoding polynucleotide
ttcggtatagggcacggaaca

SEQ ID NO: 3553 - DNA, 21 bp, synthetic construct
  misc_feature 1..21: note = n-mer motif encoding polynucleotide
  source 1..21: mol_type = other DNA
cctcttcatgttgcttctcct

SEQ ID NO: 3554 - DNA, 21 bp, synthetic construct
  misc_feature 1..21: note = n-mer motif encoding polynucleotide
  source 1..21: mol_type = other DNA
ttgggtaatggtagttctttg

SEQ ID NO: 3555 - DNA, 21 bp, synthetic construct
  source 1..21: mol_type = other DNA
  misc_feature 1..21: note = n-mer motif encoding polynucleotide
agtggcaacgcgaacatagta

SEQ ID NO: 3556 - DNA, 21 bp, synthetic construct
  misc_feature 1..21: note = n-mer motif encoding polynucleotide
  source 1..21: mol_type = other DNA
gggattaatcgtactagtgag

SEQ ID NO: 3557 - DNA, 21 bp, synthetic construct
  source 1..21: mol_type = other DNA
  misc_feature 1..21: note = n-mer motif encoding polynucleotide
tcggataataggaatactgcg

SEQ ID NO: 3558 - DNA, 21 bp, synthetic construct
  source 1..21: mol_type = other DNA
  misc_feature 1..21: note = n-mer motif encoding polynucleotide
cgattaggaaccgtcaccaac

SEQ ID NO: 3559 - DNA, 21 bp, synthetic construct
  source 1..21: mol_type = other DNA
  misc_feature 1..21: note = n-mer motif encoding polynucleotide
gtggagcatgttgctcatcag

SEQ ID NO: 3560 - DNA, 21 bp, synthetic construct
  misc_feature 1..21: note = n-mer motif encoding polynucleotide
  source 1..21: mol_type = other DNA
tatactaagcatcctgttgag

SEQ ID NO: 3561 - DNA, 21 bp, synthetic construct
  misc_feature 1..21: note = n-mer motif encoding polynucleotide
  source 1..21: mol_type = other DNA
tcccgaatcacggtgaacgca

SEQ ID NO: 3562 - DNA, 21 bp, synthetic construct
  misc_feature 1..21: note = n-mer motif encoding polynucleotide
  source 1..21: mol_type = other DNA
acagtatcgtcatacgtacaa

SEQ ID NO: 3563 - DNA, 21 bp, synthetic construct
  misc_feature 1..21: note = n-mer motif encoding polynucleotide
  source 1..21: mol_type = other DNA
cgcgccgaagggagctctggc

SEQ ID NO: 3564 - DNA, 21 bp, synthetic construct
  source 1..21: mol_type = other DNA
  misc_feature 1..21: note = n-mer motif encoding polynucleotide
gctgtggggcggtcggatgat

SEQ ID NO: 3565 - DNA, 21 bp, synthetic construct
  misc_feature 1..21: note = n-mer motif encoding polynucleotide
  source 1..21: mol_type = other DNA
cgcataggcgttggagcacca

SEQ ID NO: 3566 - DNA, 21 bp, synthetic construct
  misc_feature 1..21: note = n-mer motif encoding polynucleotide
  source 1..21: mol_type = other DNA
tactcaaacctcgtactttcc

SEQ ID NO: 3567 - DNA, 21 bp, synthetic construct
  source 1..21: mol_type = other DNA
  misc_feature 1..21: note = n-mer motif encoding polynucleotide
tcgacgaattctgaggcggtt

SEQ ID NO: 3568 - DNA, 21 bp, synthetic construct
  misc_feature 1..21: note = n-mer motif encoding polynucleotide
  source 1..21: mol_type = other DNA
gcaatgtcaacccacatgata

SEQ ID NO: 3569 - DNA, 21 bp, synthetic construct
  source 1..21: mol_type = other DNA
  misc_feature 1..21: note = n-mer motif encoding polynucleotide
agggttgatatttcgcatttt

SEQ ID NO: 3570 - DNA, 21 bp, synthetic construct
  source 1..21: mol_type = other DNA
  misc_feature 1..21: note = n-mer motif encoding polynucleotide
attcttacgcctttggataag

SEQ ID NO: 3571 - DNA, 21 bp, synthetic construct
  misc_feature 1..21: note = n-mer motif encoding polynucleotide
  source 1..21: mol_type = other DNA
gttgcgagtacgacgcagact

SEQ ID NO: 3572 - DNA, 21 bp, synthetic construct
  source 1..21: mol_type = other DNA
  misc_feature 1..21: note = n-mer motif encoding polynucleotide
gaccgtagctccgcgacgctc

SEQ ID NO: 3573 - DNA, 21 bp, synthetic construct
  misc_feature 1..21: note = n-mer motif encoding polynucleotide
  source 1..21: mol_type = other DNA
gatcatagtgagcagaattcg

SEQ ID NO: 3574 - DNA, 21 bp, synthetic construct
  misc_feature 1..21: note = n-mer motif encoding polynucleotide
  source 1..21: mol_type = other DNA
atacgcagcgaattggaagta

SEQ ID NO: 3575 - DNA, 21 bp, synthetic construct
  misc_feature 1..21: note = n-mer motif encoding polynucleotide
  source 1..21: mol_type = other DNA
gcgaatctgggtgatgttgag

SEQ ID NO: 3576 - DNA, 21 bp, synthetic construct
  source 1..21: mol_type = other DNA
  misc_feature 1..21: note = n-mer motif encoding polynucleotide
gagcttaaggagagtcagaag

SEQ ID NO: 3577 - DNA, 21 bp, synthetic construct
  source 1..21: mol_type = other DNA
  misc_feature 1..21: note = n-mer motif encoding polynucleotide
tcatacacagcaggaagaccc

SEQ ID NO: 3578 - DNA, 21 bp, synthetic construct
  source 1..21: mol_type = other DNA
  misc_feature 1..21: note = n-mer motif encoding polynucleotide
ggaccagcctacaaccaaagc

SEQ ID NO: 3579 - DNA, 21 bp, synthetic construct
  source 1..21: mol_type = other DNA
  misc_feature 1..21: note = n-mer motif encoding polynucleotide
catgagagtcattatgttagt

SEQ ID NO: 3580 - DNA, 21 bp, synthetic construct
  misc_feature 1..21: note = n-mer motif encoding polynucleotide
  source 1..21: mol_type = other DNA
aatggtaagctgggtacgact

SEQ ID NO: 3581 - DNA, 21 bp, synthetic construct
  source 1..21: mol_type = other DNA
  misc_feature 1..21: note = n-mer motif encoding polynucleotide
cttccgcctgcgtcggcgggt

SEQ ID NO: 3582 - DNA, 21 bp, synthetic construct
  source 1..21: mol_type = other DNA
  misc_feature 1..21: note = n-mer motif encoding polynucleotide
ttgtcgtatcagactggtcat

SEQ ID NO: 3583 - DNA, 21 bp, synthetic construct
  misc_feature 1..21: note = n-mer motif encoding polynucleotide
  source 1..21: mol_type = other DNA
gacagccaaatcacaagacta

SEQ ID NO: 3584 - DNA, 21 bp, synthetic construct
  source 1..21: mol_type = other DNA
  misc_feature 1..21: note = n-mer motif encoding polynucleotide
aacgtatacgaagggcaccgc

SEQ ID NO: 3585 - DNA, 21 bp, synthetic construct
  source 1..21: mol_type = other DNA
  misc_feature 1..21: note = n-mer motif encoding polynucleotide
ttgtttactgctgggagtact

SEQ ID NO: 3586 - DNA, 21 bp, synthetic construct
  source 1..21: mol_type = other DNA
  misc_feature 1..21: note = n-mer motif encoding polynucleotide
cttgtgaataatgatgggact

SEQ ID NO: 3587 - DNA, 21 bp, synthetic construct
  misc_feature 1..21: note = n-mer motif encoding polynucleotide
  source 1..21: mol_type = other DNA
gcgatgaatgtgcggagtgat

SEQ ID NO: 3588 - DNA, 21 bp, synthetic construct
  misc_feature 1..21: note = n-mer motif encoding polynucleotide
  source 1..21: mol_type = other DNA
gccagccttgaccgccttcca

SEQ ID NO: 3589 - DNA, 21 bp, synthetic construct
  misc_feature 1..21: note = n-mer motif encoding polynucleotide
  source 1..21: mol_type = other DNA
ggctctcggaacggacccaca

SEQ ID NO: 3590 - DNA, 21 bp, synthetic construct
  source 1..21: mol_type = other DNA
  misc_feature 1..21: note = n-mer motif encoding polynucleotide
atgagtgatgggcattcgaag

SEQ ID NO: 3591 - DNA, 21 bp, synthetic construct
  source 1..21: mol_type = other DNA
  misc_feature 1..21: note = n-mer motif encoding polynucleotide
tctaaccgtacggaaatgcca

SEQ ID NO: 3592 - DNA, 21 bp, synthetic construct
  misc_feature 1..21: note = n-mer motif encoding polynucleotide
  source 1..21: mol_type = other DNA
aacgtggtgaaaaacaacaca

SEQ ID NO: 3593 - DNA, 21 bp, synthetic construct
  source 1..21: mol_type = other DNA
  misc_feature 1..21: note = n-mer motif encoding polynucleotide
gtggtcgactcaacatacccg

SEQ ID NO: 3594 - DNA, 21 bp, synthetic construct
  source 1..21: mol_type = other DNA
  misc_feature 1..21: note = n-mer motif encoding polynucleotide
gtggctggggggacttcggag

SEQ ID NO: 3595 - DNA, 21 bp, synthetic construct
  source 1..21: mol_type = other DNA
  misc_feature 1..21: note = n-mer motif encoding polynucleotide
cgggcagacatgactccctta

SEQ ID NO: 3596 - DNA, 21 bp, synthetic construct
  source 1..21: mol_type = other DNA
  misc_feature 1..21: note = n-mer motif encoding polynucleotide
ggacacgaacaaactgacgca

SEQ ID NO: 3597 - DNA, 21 bp, synthetic construct
  source 1..21: mol_type = other DNA
  misc_feature 1..21: note = n-mer motif encoding polynucleotide
agtgctttgattagtgtggtt

SEQ ID NO: 3598 - DNA, 21 bp, synthetic construct
  misc_feature 1..21: note = n-mer motif encoding polynucleotide
  source 1..21: mol_type = other DNA
aactcgacaacggcacaatca

SEQ ID NO: 3599 - DNA, 21 bp, synthetic construct
  misc_feature 1..21: note = n-mer motif encoding polynucleotide
  source 1..21: mol_type = other DNA
tacggcgacctaactacagtc

SEQ ID NO: 3600 - DNA, 21 bp, synthetic construct
  source 1..21: mol_type = other DNA
  misc_feature 1..21: note = n-mer motif encoding polynucleotide
gcacgcaacgacggacaagga

SEQ ID NO: 3601 - DNA, 21 bp, synthetic construct
  misc_feature 1..21: note = n-mer motif encoding polynucleotide
  source 1..21: mol_type = other DNA
ctgaacgttagttcatccaaa

SEQ ID NO: 3602 - DNA, 21 bp, synthetic construct
  source 1..21: mol_type = other DNA
  misc_feature 1..21: note = n-mer motif encoding polynucleotide
tctggcgtctcgaaagaacgg

SEQ ID NO: 3603 - DNA, 21 bp, synthetic construct
  source 1..21: mol_type = other DNA
  misc_feature 1..21: note = n-mer motif encoding polynucleotide
aacatggaacacaccatggcg

SEQ ID NO: 3604 - DNA, 21 bp, synthetic construct
  misc_feature 1..21: note = n-mer motif encoding polynucleotide
  source 1..21: mol_type = other DNA
gctcgtccggcttcgtctgat

SEQ ID NO: 3605 - DNA, 21 bp, synthetic construct
  source 1..21: mol_type = other DNA
  misc_feature 1..21: note = n-mer motif encoding polynucleotide
cttagggaagaatctgcacgt

SEQ ID NO: 3606 - DNA, 21 bp, synthetic construct
  source 1..21: mol_type = other DNA
  misc_feature 1..21: note = n-mer motif encoding polynucleotide
ttggccaacatgtccgcacca

SEQ ID NO: 3607 - DNA, 21 bp, synthetic construct
  misc_feature 1..21: note = n-mer motif encoding polynucleotide
  source 1..21: mol_type = other DNA
aaccacacggtagaaggacgc

SEQ ID NO: 3608 - DNA, 21 bp, synthetic construct
  misc_feature 1..21: note = n-mer motif encoding polynucleotide
  source 1..21: mol_type = other DNA
cctcagcatcagcatgagcat

SEQ ID NO: 3609 - DNA, 21 bp, synthetic construct
  misc_feature 1..21: note = n-mer motif encoding polynucleotide
  source 1..21: mol_type = other DNA
aattcttcggagctgaagacg

SEQ ID NO: 3610 - DNA, 21 bp, synthetic construct
  misc_feature 1..21: note = n-mer motif encoding polynucleotide
  source 1..21: mol_type = other DNA
cttgttgctgagcgtttgccg

SEQ ID NO: 3611 - DNA, 21 bp, synthetic construct
  misc_feature 1..21: note = n-mer motif encoding polynucleotide
  source 1..21: mol_type = other DNA
aacgttatgcactcttcctcc

SEQ ID NO: 3612 - DNA, 21 bp, synthetic construct
  misc_feature 1..21: note = n-mer motif encoding polynucleotide
  source 1..21: mol_type = other DNA
gcgagtgataagggggcgaat

SEQ ID NO: 3613 - DNA, 21 bp, synthetic construct
  misc_feature 1..21: note = n-mer motif encoding polynucleotide
  source 1..21: mol_type = other DNA
agtctggatcggaagcctccg

SEQ ID NO: 3614 - DNA, 21 bp, synthetic construct
  source 1..21: mol_type = other DNA
  misc_feature 1..21: note = n-mer motif encoding polynucleotide
acagaacacgaaaaatccact

SEQ ID NO: 3615 - DNA, 21 bp, synthetic construct
  misc_feature 1..21: note = n-mer motif encoding polynucleotide
  source 1..21: mol_type = other DNA
cctcataatcaggagatgggt

SEQ ID NO: 3616 - DNA, 21 bp, synthetic construct
  misc_feature 1..21: note = n-mer motif encoding polynucleotide
  source 1..21: mol_type = other DNA
gagtctaagactgtggttatt

SEQ ID NO: 3617 - DNA, 21 bp, synthetic construct
  source 1..21: mol_type = other DNA
  misc_feature 1..21: note = n-mer motif encoding polynucleotide
tcgacgggccaaaacttaaaa

SEQ ID NO: 3618 - DNA, 21 bp, synthetic construct
  source 1..21: mol_type = other DNA
  misc_feature 1..21: note = n-mer motif encoding polynucleotide
gttcttcatgtttctgatgtt

SEQ ID NO: 3619 - DNA, 21 bp, synthetic construct
  source 1..21: mol_type = other DNA
  misc_feature 1..21: note = n-mer motif encoding polynucleotide
cctgacgcagcgcgtagcccg

SEQ ID NO: 3620 - DNA, 21 bp, synthetic construct
  source 1..21: mol_type = other DNA
  misc_feature 1..21: note = n-mer motif encoding polynucleotide
gctcctcggcatgctcatcct

SEQ ID NO: 3621 - DNA, 21 bp, synthetic construct
  source 1..21: mol_type = other DNA
  misc_feature 1..21: note = n-mer motif encoding polynucleotide
catgtgaatcctacgccggcg

SEQ ID NO: 3622 - DNA, 21 bp, synthetic construct
  source 1..21: mol_type = other DNA
  misc_feature 1..21: note = n-mer motif encoding polynucleotide
ttgcctaatgagcgtccgggt

SEQ ID NO: 3623 - DNA, 21 bp, synthetic construct
  source 1..21: mol_type = other DNA
  misc_feature 1..21: note = n-mer motif encoding polynucleotide
gaggctaagggttttggtcat

SEQ ID NO: 3624 - DNA, 21 bp, synthetic construct
  source 1..21: mol_type = other DNA
  misc_feature 1..21: note = n-mer motif encoding polynucleotide
tcagaaaacacctctgtaccc

SEQ ID NO: 3625 - DNA, 21 bp, synthetic construct
  source 1..21: mol_type = other DNA
  misc_feature 1..21: note = n-mer motif encoding polynucleotide
ggtcccggagaaaactaccga

SEQ ID NO: 3626 - DNA, 21 bp, synthetic construct
  source 1..21: mol_type = other DNA
  misc_feature 1..21: note = n-mer motif encoding polynucleotide
tctcatgagatgaataatggt

SEQ ID NO: 3627 - DNA, 21 bp, synthetic construct
  source 1..21: mol_type = other DNA
  misc_feature 1..21: note = n-mer motif encoding polynucleotide
gtagacacctacagcggtctg

SEQ ID NO: 3628 - DNA, 21 bp, synthetic construct
  misc_feature 1..21: note = n-mer motif encoding polynucleotide
  source 1..21: mol_type = other DNA
ggagtcctaggaaacatggta

SEQ ID NO: 3629 - DNA, 21 bp, synthetic construct
  misc_feature 1..21: note = n-mer motif encoding polynucleotide
  source 1..21: mol_type = other DNA
gcgctggataatagtagtcgg

SEQ ID NO: 3630 - DNA, 21 bp, synthetic construct
  misc_feature 1..21: note = n-mer motif encoding polynucleotide
  source 1..21: mol_type = other DNA
tttctgggttctagtaatcat

SEQ ID NO: 3631 - DNA, 21 bp, synthetic construct
  misc_feature 1..21: note = n-mer motif encoding polynucleotide
  source 1..21: mol_type = other DNA
cctgtggttcatggtgagcct

SEQ ID NO: 3632 - DNA, 21 bp, synthetic construct
  source 1..21: mol_type = other DNA
  misc_feature 1..21: note = n-mer motif encoding polynucleotide
cgcagggaaggtatcctaatg

SEQ ID NO: 3633 - DNA, 21 bp, synthetic construct
  source 1..21: mol_type = other DNA
  misc_feature 1..21: note = n-mer motif encoding polynucleotide
cagcagggggcgcctacttct

SEQ ID NO: 3634 - DNA, 21 bp, synthetic construct
  source 1..21: mol_type = other DNA
  misc_feature 1..21: note = n-mer motif encoding polynucleotide
aaggttagtggtggggagacg

SEQ ID NO: 3635 - DNA, 21 bp, synthetic construct
  source 1..21: mol_type = other DNA
  misc_feature 1..21: note = n-mer motif encoding polynucleotide
gcgaaacacgaaagctcgtct

SEQ ID NO: 3636 - DNA, 21 bp, synthetic construct
  misc_feature 1..21: note = n-mer motif encoding polynucleotide
  source 1..21: mol_type = other DNA
attcttatgggtgcgcgtact

SEQ ID NO: 3637 - DNA, 21 bp, synthetic construct
  source 1..21: mol_type = other DNA
  misc_feature 1..21: note = n-mer motif encoding polynucleotide
acgctaggcagcagcagcacc

SEQ ID NO: 3638 - DNA, 21 bp, synthetic construct
  misc_feature 1..21: note = n-mer motif encoding polynucleotide
  source 1..21: mol_type = other DNA
ctaagatctgaaccgacacaa

SEQ ID NO: 3639 - DNA, 21 bp, synthetic construct
  source 1..21: mol_type = other DNA
  misc_feature 1..21: note = n-mer motif encoding polynucleotide
cgctcggaacaaaaaactccg

SEQ ID NO: 3640 - DNA, 21 bp, synthetic construct
  misc_feature 1..21: note = n-mer motif encoding polynucleotide
  source 1..21: mol_type = other DNA
cacgctccaagcggcgccata

SEQ ID NO: 3641 - DNA, 21 bp, synthetic construct
  source 1..21: mol_type = other DNA
  misc_feature 1..21: note = n-mer motif encoding polynucleotide
agtagtgttacttcgagggag

SEQ ID NO: 3642 - DNA, 21 bp, synthetic construct
  misc_feature 1..21: note = n-mer motif encoding polynucleotide
  source 1..21: mol_type = other DNA
gtgaatccgcatcctgcgcag

SEQ ID NO: 3643 - DNA, 21 bp, synthetic construct
  misc_feature 1..21: note = n-mer motif encoding polynucleotide
  source 1..21: mol_type = other DNA
caatactcgatggacacgcgc

SEQ ID NO: 3644 - DNA, 21 bp, synthetic construct
  source 1..21: mol_type = other DNA
  misc_feature 1..21: note = n-mer motif encoding polynucleotide
actcctggtgttactaggacg

SEQ ID NO: 3645 - DNA, 21 bp, synthetic construct
  misc_feature 1..21: note = n-mer motif encoding polynucleotide
  source 1..21: mol_type = other DNA
ctttatgaggttggtactcct

SEQ ID NO: 3646 - DNA, 21 bp, synthetic construct
  source 1..21: mol_type = other DNA
  misc_feature 1..21: note = n-mer motif encoding polynucleotide
acgatgacgagtgagctttcg

SEQ ID NO: 3647 - DNA, 21 bp, synthetic construct
  misc_feature 1..21: note = n-mer motif encoding polynucleotide
  source 1..21: mol_type = other DNA
tcaggttcggaataccgtacc

SEQ ID NO: 3648 - DNA, 21 bp, synthetic construct
  source 1..21: mol_type = other DNA
  misc_feature 1..21: note = n-mer motif encoding polynucleotide
gaaatgcaaaccaaaaacgcc

SEQ ID NO: 3649 - DNA, 21 bp, synthetic construct
  source 1..21: mol_type = other DNA
  misc_feature 1..21: note = n-mer motif encoding polynucleotide
ggccacgaaaacatgggcgtg

SEQ ID NO: 3650 - DNA, 21 bp, synthetic construct
  misc_feature 1..21: note = n-mer motif encoding polynucleotide
  source 1..21: mol_type = other DNA
ggggcgcatacgtcggcttcg

SEQ ID NO: 3651 - DNA, 21 bp, synthetic construct
  misc_feature 1..21: note = n-mer motif encoding polynucleotide
  source 1..21: mol_type = other DNA
gctgatacgctgctgcgtagg

SEQ ID NO: 3652 - DNA, 21 bp, synthetic construct
  source 1..21: mol_type = other DNA
  misc_feature 1..21: note = n-mer motif encoding polynucleotide
gacaacagcaacaacgtccca

SEQ ID NO: 3653 - DNA, 21 bp, synthetic construct
  source 1..21: mol_type = other DNA
  misc_feature 1..21: note = n-mer motif encoding polynucleotide
atgactgctaacttggtggaa

SEQ ID NO: 3654 - DNA, 21 bp, synthetic construct
  misc_feature 1..21: note = n-mer motif encoding polynucleotide
  source 1..21: mol_type = other DNA
gaagcgggacgcacgcttcaa

SEQ ID NO: 3655 - DNA, 21 bp, synthetic construct
  source 1..21: mol_type = other DNA
  misc_feature 1..21: note = n-mer motif encoding polynucleotide
agacacgtcgtccccgactcc

SEQ ID NO: 3656 - DNA, 21 bp, synthetic construct
  source 1..21: mol_type = other DNA
  misc_feature 1..21: note = n-mer motif encoding polynucleotide
gtgagttctgagcagtatagg

SEQ ID NO: 3657 - DNA, 21 bp, synthetic construct
  misc_feature 1..21: note = n-mer motif encoding polynucleotide
  source 1..21: mol_type = other DNA
ggtatcgaagcaagtcgcgga

SEQ ID NO: 3658 - DNA, 21 bp, synthetic construct
  misc_feature 1..21: note = n-mer motif encoding polynucleotide
  source 1..21: mol_type = other DNA
agacaaggcgtgaacggagta

SEQ ID NO: 3659 - DNA, 21 bp, synthetic construct
  source 1..21: mol_type = other DNA
  misc_feature 1..21: note = n-mer motif encoding polynucleotide
actgtgatgatgagtacgagg

SEQ ID NO: 3660 - DNA, 21 bp, synthetic construct
  misc_feature 1..21: note = n-mer motif encoding polynucleotide
  source 1..21: mol_type = other DNA
tggcaagaccacaacaaagtc

SEQ ID NO: 3661 - DNA, 21 bp, synthetic construct
  misc_feature 1..21: note = n-mer motif encoding polynucleotide
  source 1..21: mol_type = other DNA
ggaatcacaggatcaacagga

SEQ ID NO: 3662 - DNA, 21 bp, synthetic construct
  source 1..21: mol_type = other DNA
  misc_feature 1..21: note = n-mer motif encoding polynucleotide
aattatgctcagagggatggt

SEQ ID NO: 3663 - DNA, 21 bp, synthetic construct
  misc_feature 1..21: note = n-mer motif encoding polynucleotide
  source 1..21: mol_type = other DNA
aaacaagaagctctgtcctca

SEQ ID NO: 3664 - DNA, 21 bp, synthetic construct
  source 1..21: mol_type = other DNA
  misc_feature 1..21: note = n-mer motif encoding polynucleotide
tcaactttagaccgaagcgaa

SEQ ID NO: 3665 - DNA, 21 bp, synthetic construct
  source 1..21: mol_type = other DNA
  misc_feature 1..21: note = n-mer motif encoding polynucleotide
gcgattacgaatacgcagcag

SEQ ID NO: 3666 - DNA, 21 bp, synthetic construct
  source 1..21: mol_type = other DNA
  misc_feature 1..21: note = n-mer motif encoding polynucleotide
aggctggcgactcagagtgct

SEQ ID NO: 3667 - DNA, 21 bp, synthetic construct
  source 1..21: mol_type = other DNA
  misc_feature 1..21: note = n-mer motif encoding polynucleotide
tggcagcttacgacgagtcat

SEQ ID NO: 3668 - DNA, 21 bp, synthetic construct
  misc_feature 1..21: note = n-mer motif encoding polynucleotide
  source 1..21: mol_type = other DNA
ggtggtagtggttctaatact

SEQ ID NO: 3669 - DNA, 21 bp, synthetic construct
  misc_feature 1..21: note = n-mer motif encoding polynucleotide
  source 1..21: mol_type = other DNA
aacttagtagcgtacacgaaa

SEQ ID NO: 3670 - DNA, 21 bp, synthetic construct
  misc_feature 1..21: note = n-mer motif encoding polynucleotide
  source 1..21: mol_type = other DNA
aaggcttcgcatgatactagt

SEQ ID NO: 3671 - DNA, 21 bp, synthetic construct
  misc_feature 1..21: note = n-mer motif encoding polynucleotide
  source 1..21: mol_type = other DNA
gccataacgataataggcact

SEQ ID NO: 3672 - DNA, 21 bp, synthetic construct
  misc_feature 1..21: note = n-mer motif encoding polynucleotide
  source 1..21: mol_type = other DNA
aacgcatcgtcggaccgcttc

SEQ ID NO: 3673 - DNA, 21 bp, synthetic construct
  source 1..21: mol_type = other DNA
  misc_feature 1..21: note = n-mer motif encoding polynucleotide
gaaacgcaacgtatcgaactg

SEQ ID NO: 3674 - DNA, 21 bp, synthetic construct
  source 1..21: mol_type = other DNA
  misc_feature 1..21: note = n-mer motif encoding polynucleotide
gtgattgaggttaattcgcgt

SEQ ID NO: 3675 - DNA, 21 bp, synthetic construct
  misc_feature 1..21: note = n-mer motif encoding polynucleotide
  source 1..21: mol_type = other DNA
gatagggatatggagggtgtt

SEQ ID NO: 3676 - DNA, 21 bp, synthetic construct
  source 1..21: mol_type = other DNA
  misc_feature 1..21: note = n-mer motif encoding polynucleotide
atttcggagatgacgcggtat

SEQ ID NO: 3677 - DNA, 21 bp, synthetic construct
  misc_feature 1..21: note = n-mer motif encoding polynucleotide
  source 1..21: mol_type = other DNA
gagcatgatgtgagtacgcgt

SEQ ID NO: 3678 - DNA, 21 bp, synthetic construct
  source 1..21: mol_type = other DNA
  misc_feature 1..21: note = n-mer motif encoding polynucleotide
cgtatggaggagactgcttat

SEQ ID NO: 3679 - DNA, 21 bp, synthetic construct
  misc_feature 1..21: note = n-mer motif encoding polynucleotide
  source 1..21: mol_type = other DNA
tatagtactgatcttaggatg

SEQ ID NO: 3680 - DNA, 21 bp, synthetic construct
  misc_feature 1..21: note = n-mer motif encoding polynucleotide
  source 1..21: mol_type = other DNA
gtgcctgagcctaagaaggcg

SEQ ID NO: 3681 - DNA, 21 bp, synthetic construct
  misc_feature 1..21: note = n-mer motif encoding polynucleotide
  source 1..21: mol_type = other DNA
acttatgcgcctaggtcgcct

SEQ ID NO: 3682 - DNA, 21 bp, synthetic construct
  misc_feature 1..21: note = n-mer motif encoding polynucleotide
  source 1..21: mol_type = other DNA
gctgcggcttcgcctttggct

SEQ ID NO: 3683 - DNA, 21 bp, synthetic construct
  source 1..21: mol_type = other DNA
  misc_feature 1..21: note = n-mer motif encoding polynucleotide
agtgggacgtatgctagtcgt

SEQ ID NO: 3684 - DNA, 21 bp, synthetic construct
  source 1..21: mol_type = other DNA
  misc_feature 1..21: note = n-mer motif encoding polynucleotide
actgaagcatcaatcgcggcg

SEQ ID NO: 3685 - DNA, 21 bp, synthetic construct
  source 1..21: mol_type = other DNA
  misc_feature 1..21: note = n-mer motif encoding polynucleotide
cgcatcgtagacacgttggga

SEQ ID NO: 3686 - DNA, 21 bp, synthetic construct
  source 1..21: mol_type = other DNA
  misc_feature 1..21: note = n-mer motif encoding polynucleotide
tatctgcaggagaagtttcct

SEQ ID NO: 3687 - DNA, 21 bp, synthetic construct
  misc_feature 1..21: note = n-mer motif encoding polynucleotide
  source 1..21: mol_type = other DNA
gttcatgatcagggggctggg

SEQ ID NO: 3688 - DNA, 21 bp, synthetic construct
  misc_feature 1..21: note = n-mer motif encoding polynucleotide
  source 1..21: mol_type = other DNA
ccccaagccactctcaacaac

SEQ ID NO: 3689 - DNA, 21 bp, synthetic construct
  source 1..21: mol_type = other DNA
  misc_feature 1..21: note = n-mer motif encoding polynucleotide
tgcggaatgtccgaatgctcg

SEQ ID NO: 3690 - DNA, 21 bp, synthetic construct
  source 1..21: mol_type = other DNA
  misc_feature 1..21: note = n-mer motif encoding polynucleotide
ggttcgcacaacgggccgaca

SEQ ID NO: 3691 - DNA, 21 bp, synthetic construct
  misc_feature 1..21: note = n-mer motif encoding polynucleotide
  source 1..21: mol_type = other DNA
tttgggtctgggccgaatctt

SEQ ID NO: 3692 - DNA, 21 bp, synthetic construct
  source 1..21: mol_type = other DNA
  misc_feature 1..21: note = n-mer motif encoding polynucleotide
atggatacgaatacgcatcgt

SEQ ID NO: 3693 - DNA, 21 bp, synthetic construct
  misc_feature 1..21: note = n-mer motif encoding polynucleotide
  source 1..21: mol_type = other DNA
aagaataatcctgaggatggt

SEQ ID NO: 3694 - DNA, 21 bp, synthetic construct
  misc_feature 1..21: note = n-mer motif encoding polynucleotide
  source 1..21: mol_type = other DNA
ctgcctacggctactggtcag

SEQ ID NO: 3695 - DNA, 21 bp, synthetic construct
  source 1..21: mol_type = other DNA
  misc_feature 1..21: note = n-mer motif encoding polynucleotide
acggctgagcgtactgagtat

SEQ ID NO: 3696 - DNA, 21 bp, synthetic construct
  source 1..21: mol_type = other DNA
  misc_feature 1..21: note = n-mer motif encoding polynucleotide
aactacagggacatcacaatg

SEQ ID NO: 3697 - DNA, 21 bp, synthetic construct
  source 1..21: mol_type = other DNA
  misc_feature 1..21: note = n-mer motif encoding polynucleotide
cccgcgagaagcgacgccctt

SEQ ID NO: 3698 - DNA, 21 bp, synthetic construct
  misc_feature 1..21: note = n-mer motif encoding polynucleotide
  source 1..21: mol_type = other DNA
tccgttgtaactcttggggtg

SEQ ID NO: 3699 - DNA, 21 bp, synthetic construct
  misc_feature 1..21: note = n-mer motif encoding polynucleotide
  source 1..21: mol_type = other DNA
gttgttaaggagattaagctg

SEQ ID NO: 3700 - DNA, 21 bp, synthetic construct
  misc_feature 1..21: note = n-mer motif encoding polynucleotide
  source 1..21: mol_type = other DNA
gaccactcgaaacaaaactct

SEQ ID NO: 3701 - DNA, 21 bp, synthetic construct
  misc_feature 1..21: note = n-mer motif encoding polynucleotide
  source 1..21: mol_type = other DNA
cagtctaatttggttattaat

SEQ ID NO: 3702 - DNA, 21 bp, synthetic construct
  source 1..21: mol_type = other DNA
  misc_feature 1..21: note = n-mer motif encoding polynucleotide
attccggttggggcgatggct

SEQ ID NO: 3703 - DNA, 21 bp, synthetic construct
  misc_feature 1..21: note = n-mer motif encoding polynucleotide
  source 1..21: mol_type = other DNA
acgtcggagatgcgtactgct

SEQ ID NO: 3704 - DNA, 21 bp, synthetic construct
  misc_feature 1..21: note = n-mer motif encoding polynucleotide
  source 1..21: mol_type = other DNA
ggtagtcagcgtgctatgaat

SEQ ID NO: 3705 - DNA, 21 bp, synthetic construct
  source 1..21: mol_type = other DNA
  misc_feature 1..21: note = n-mer motif encoding polynucleotide
cacctgtcacaagcaaaccac

SEQ ID NO: 3706 - DNA, 21 bp, synthetic construct
  misc_feature 1..21: note = n-mer motif encoding polynucleotide
  source 1..21: mol_type = other DNA
ggagggaactcccacggggta

SEQ ID NO: 3707 - DNA, 21 bp, synthetic construct
  source 1..21: mol_type = other DNA
  misc_feature 1..21: note = n-mer motif encoding polynucleotide
gtgactcgtagtacgaaggag

SEQ ID NO: 3708 - DNA, 21 bp, synthetic construct
  source 1..21: mol_type = other DNA
  misc_feature 1..21: note = n-mer motif encoding polynucleotide
atgctcagagcaagcaccgcc

SEQ ID NO: 3709 - DNA, 21 bp, synthetic construct
  misc_feature 1..21: note = n-mer motif encoding polynucleotide
  source 1..21: mol_type = other DNA
ggcaggcaaataccagaacaa

SEQ ID NO: 3710 - DNA, 21 bp, synthetic construct
  source 1..21: mol_type = other DNA
  misc_feature 1..21: note = n-mer motif encoding polynucleotide
tggaatcagaatgtgtctcat

SEQ ID NO: 3711 - DNA, 21 bp, synthetic construct
  misc_feature 1..21: note = n-mer motif encoding polynucleotide
  source 1..21: mol_type = other DNA
cagcggggggagcttcctgcg

SEQ ID NO: 3712 - DNA, 21 bp, synthetic construct
  misc_feature 1..21: note = n-mer motif encoding polynucleotide
  source 1..21: mol_type = other DNA
gcgaatgatagtttgcgttct

SEQ ID NO: 3713 - DNA, 21 bp, synthetic construct
  source 1..21: mol_type = other DNA
  misc_feature 1..21: note = n-mer motif encoding polynucleotide
aacatgccaccggaatcgcac

SEQ ID NO: 3714 - DNA, 21 bp, synthetic construct
  source 1..21: mol_type = other DNA
  misc_feature 1..21: note = n-mer motif encoding polynucleotide
aatttgagtcttcagagtctg

SEQ ID NO: 3715 - DNA, 21 bp, synthetic construct
  misc_feature 1..21: note = n-mer motif encoding polynucleotide
  source 1..21: mol_type = other DNA
acatcagacggtctactaagt

SEQ ID NO: 3716 - DNA, 21 bp, synthetic construct
  source 1..21: mol_type = other DNA
  misc_feature 1..21: note = n-mer motif encoding polynucleotide
gcgggccaagcgtaccaatcc

SEQ ID NO: 3717 - DNA, 21 bp, synthetic construct
  source 1..21: mol_type = other DNA
  misc_feature 1..21: note = n-mer motif encoding polynucleotide
ctgagtgtgaaggaggagatt

SEQ ID NO: 3718 - DNA, 21 bp, synthetic construct
  misc_feature 1..21: note = n-mer motif encoding polynucleotide
  source 1..21: mol_type = other DNA
gataatagtcctgctaatcat

SEQ ID NO: 3719 - DNA, 21 bp, synthetic construct
  source 1..21: mol_type = other DNA
  misc_feature 1..21: note = n-mer motif encoding polynucleotide
atgcacaacctaccctcatac

SEQ ID NO: 3720 - DNA, 21 bp, synthetic construct
  misc_feature 1..21: note = n-mer motif encoding polynucleotide
  source 1..21: mol_type = other DNA
taccaagcctcaaacaacagt

SEQ ID NO: 3721 - DNA, 21 bp, synthetic construct
  source 1..21: mol_type = other DNA
  misc_feature 1..21: note = n-mer motif encoding polynucleotide
gcgcgggcagaaggggtcttc

SEQ ID NO: 3722 - DNA, 21 bp, synthetic construct
  source 1..21: mol_type = other DNA
  misc_feature 1..21: note = n-mer motif encoding polynucleotide
ggccgagaaggaaacctacca

SEQ ID NO: 3723 - DNA, 21 bp, synthetic construct
  misc_feature 1..21: note = n-mer motif encoding polynucleotide
  source 1..21: mol_type = other DNA
caagctgcagaaagggacaga

SEQ ID NO: 3724 - DNA, 21 bp, synthetic construct
  source 1..21: mol_type = other DNA
  misc_feature 1..21: note = n-mer motif encoding polynucleotide
gttgagaataatcgtatgagt

SEQ ID NO: 3725 - DNA, 21 bp, synthetic construct
  misc_feature 1..21: note = n-mer motif encoding polynucleotide
  source 1..21: mol_type = other DNA
aatatgtcgcatagtactctg

SEQ ID NO: 3726 - DNA, 21 bp, synthetic construct
  misc_feature 1..21: note = n-mer motif encoding polynucleotide
  source 1..21: mol_type = other DNA
tcttcgttgggtcttgctccg

SEQ ID NO: 3727 - DNA, 21 bp, synthetic construct
  misc_feature 1..21: note = n-mer motif encoding polynucleotide
  source 1..21: mol_type = other DNA
aacgtcgctccctacagtagc

SEQ ID NO: 3728 - DNA, 21 bp, synthetic construct
  misc_feature 1..21: note = n-mer motif encoding polynucleotide
  source 1..21: mol_type = other DNA
aggcctgcgcagctgcctgag

SEQ ID NO: 3729 - DNA, 21 bp, synthetic construct
  misc_feature 1..21: note = n-mer motif encoding polynucleotide
  source 1..21: mol_type = other DNA
atgtcgggttctgggaacgca

SEQ ID NO: 3730 - DNA, 21 bp, synthetic construct
  source 1..21: mol_type = other DNA
  misc_feature 1..21: note = n-mer motif encoding polynucleotide
cacgggggggaacaccggaac

SEQ ID NO: 3731 - DNA, 21 bp, synthetic construct
  source 1..21: mol_type = other DNA
  misc_feature 1..21: note = n-mer motif encoding polynucleotide
gcatccggcgcacgctacgtc

SEQ ID NO: 3732 - DNA, 21 bp, synthetic construct
  misc_feature 1..21: note = n-mer motif encoding polynucleotide
  source 1..21: mol_type = other DNA
caaaaccacgcgtctggtgaa

SEQ ID NO: 3733 - DNA, 21 bp, synthetic construct
  misc_feature 1..21: note = n-mer motif encoding polynucleotide
  source 1..21: mol_type = other DNA
gcacaccaaaaagacctacgc

SEQ ID NO: 3734 - DNA, 21 bp, synthetic construct
  misc_feature 1..21: note = n-mer motif encoding polynucleotide
  source 1..21: mol_type = other DNA
tttgggaaggttggtactgct

SEQ ID NO: 3735 - DNA, 21 bp, synthetic construct
  source 1..21: mol_type = other DNA
  misc_feature 1..21: note = n-mer motif encoding polynucleotide
ctgcagaagtcgactctggct

SEQ ID NO: 3736 - DNA, 21 bp, synthetic construct
  misc_feature 1..21: note = n-mer motif encoding polynucleotide
  source 1..21: mol_type = other DNA
attcataatgagtcttatggt

SEQ ID NO: 3737 - protein, 7 aa, synthetic construct
  REGION 1..7: note = n-mer motif
RGDLTTP

SEQ ID NO: 3738 - protein, 7 aa, synthetic construct
  REGION 1..7: note = n-mer motif
RGDLNQY

SEQ ID NO: 3739 - protein, 7 aa, synthetic construct
  REGION 1..7: note = n-mer motif
RGDLSTP

SEQ ID NO: 3740 - protein, 7 aa, synthetic construct
  REGION 1..7: note = n-mer motif
RGDQLYH

SEQ ID NO: 3741 - protein, 7 aa, synthetic construct
  REGION 1..7: note = n-mer motif
RGDTMSK

SEQ ID NO: 3742 - protein, 7 aa, synthetic construct
  REGION 1..7: note = n-mer motif
RGDATEL

SEQ ID NO: 3743 - protein, 7 aa, synthetic construct
  REGION 1..7: note = n-mer motif
RGDLSTP

SEQ ID NO: 3744 - protein, 7 aa, synthetic construct
  REGION 1..7: note = n-mer motif
RGDMINT

SEQ ID NO: 3745 - protein, 7 aa, synthetic construct
  REGION 1..7: note = n-mer motif
RGDLNQY

SEQ ID NO: 3746 - protein, 7 aa, synthetic construct
  REGION 1..7: note = n-mer motif
RGDTMSK

SEQ ID NO: 3747 - protein, 7 aa, synthetic construct
  REGION 1..7: note = n-mer motif
RGDLTTP

SEQ ID NO: 3748 - protein, 7 aa, synthetic construct
  REGION 1..7: note = n-mer motif
RGDLNDS

SEQ ID NO: 3749 - protein, 7 aa, synthetic construct
  REGION 1..7: note = n-mer motif
ANPNILD

SEQ ID NO: 3750 - protein, 7 aa, synthetic construct
  REGION 1..7: note = n-mer motif
RGDTMNY

SEQ ID NO: 3751 - protein, 7 aa, synthetic construct
  REGION 1..7: note = n-mer motif
MSNLGYE

SEQ ID NO: 3752 - protein, 7 aa, synthetic construct
  REGION 1..7: note = n-mer motif
YTSQTST

SEQ ID NO: 3753 - protein, 7 aa, synthetic construct
  REGION 1..7: note = n-mer motif
LGGNSRF

SEQ ID NO: 3754 - protein, 7 aa, synthetic construct
  REGION 1..7: note = n-mer motif
QSQAIQL

SEQ ID NO: 3755 - protein, 7 aa, synthetic construct
  REGION 1..7: note = n-mer motif
NTYTPGK

SEQ ID NO: 3756 - protein, 7 aa, synthetic construct
  REGION 1..7: note = n-mer motif
GAEAGRQ

SEQ ID NO: 3757 - protein, 7 aa, synthetic construct
  REGION 1..7: note = n-mer motif
EHATAKQ

SEQ ID NO: 3758 - protein, 7 aa, synthetic construct
  REGION 1..7: note = n-mer motif
AAQLVSP

SEQ ID NO: 3759 - protein, 7 aa, synthetic construct
  REGION 1..7: note = n-mer motif
DQTASIV

SEQ ID NO: 3760 - protein, 7 aa, synthetic construct
  REGION 1..7: note = n-mer motif
VQTHIGV

SEQ ID NO: 3761 - protein, 7 aa, synthetic construct
  REGION 1..7: note = n-mer motif
SYGNTHD

SEQ ID NO: 3762 - protein, 7 aa, synthetic construct
  REGION 1..7: note = n-mer motif
TSTASKQ

SEQ ID NO: 3763 - protein, 7 aa, synthetic construct
  REGION 1..7: note = n-mer motif
LVTHERI

SEQ ID NO: 3764 - protein, 7 aa, synthetic construct
  REGION 1..7: note = n-mer motif
MDKSNNS

SEQ ID NO: 3765 - protein, 7 aa, synthetic construct
  REGION 1..7: note = n-mer motif
RGDMSRE

SEQ ID NO: 3766 - protein, 7 aa, synthetic construct
  REGION 1..7: note = n-mer motif
RGDVAEI

SEQ ID NO: 3767 - protein, 7 aa, synthetic construct
  REGION 1..7: note = n-mer motif
GGENRTP

SEQ ID NO: 3768 - protein, 7 aa, synthetic construct
  REGION 1..7: note = n-mer motif
AGHQQLA

SEQ ID NO: 3769 - protein, 7 aa, synthetic construct
  REGION 1..7: note = n-mer motif
RLNSSMN

SEQ ID NO: 3770 - protein, 7 aa, synthetic construct
  REGION 1..7: note = n-mer motif
YYEKLSA

SEQ ID NO: 3771 - protein, 7 aa, synthetic construct
  REGION 1..7: note = n-mer motif
EASNYER

SEQ ID NO: 3772 - protein, 7 aa, synthetic construct
  REGION 1..7: note = n-mer motif
FQTDTHR

SEQ ID NO: 3773 - protein, 7 aa, synthetic construct
  REGION 1..7: note = n-mer motif
NSSQWPN

SEQ ID NO: 3774 - protein, 7 aa, synthetic construct
  REGION 1..7: note = n-mer motif
DGKTTSN

SEQ ID NO: 3775 - protein, 7 aa, synthetic construct
  REGION 1..7: note = n-mer motif
AVHATSS

SEQ ID NO: 3776 - protein, 7 aa, synthetic construct
  REGION 1..7: note = n-mer motif
KTLPGRE

SEQ ID NO: 3777 - protein, 7 aa, synthetic construct
  REGION 1..7: note = n-mer motif
ILKSDAP

SEQ ID NO: 3778 - protein, 7 aa, synthetic construct
  REGION 1..7: note = n-mer motif
STNEAPK

SEQ ID NO: 3779 - protein, 7 aa, synthetic construct
  REGION 1..7: note = n-mer motif
FDSANGR

SEQ ID NO: 3780 - protein, 7 aa, synthetic construct
  REGION 1..7: note = n-mer motif
MDAAYGS

SEQ ID NO: 3781 - protein, 7 aa, synthetic construct
  REGION 1..7: note = n-mer motif
NKDHNHL

SEQ ID NO: 3782 - protein, 7 aa, synthetic construct
  REGION 1..7: note = n-mer motif
GQYSQTL

SEQ ID NO: 3783 - protein, 7 aa, synthetic construct
  REGION 1..7: note = n-mer motif
EAFPRAG

SEQ ID NO: 3784 - protein, 7 aa, synthetic construct
  REGION 1..7: note = n-mer motif
EHTHLNP

SEQ ID NO: 3785 - protein, 7 aa, synthetic construct
  REGION 1..7: note = n-mer motif
MQREDAN

SEQ ID NO: 3786 - protein, 7 aa, synthetic construct
  REGION 1..7: note = n-mer motif
LTGSDMK

SEQ ID NO: 3787 - protein, 7 aa, synthetic construct
  REGION 1..7: note = n-mer motif
RVNNDAI

SEQ ID NO: 3788 - protein, 7 aa, synthetic construct
  REGION 1..7: note = n-mer motif
RGDQGTH

SEQ ID NO: 3789 - protein, 7 aa, synthetic construct
  REGION 1..7: note = n-mer motif
INISSDF

SEQ ID NO: 3790 - protein, 7 aa, synthetic construct
  REGION 1..7: note = n-mer motif
NNDNGFV

SEQ ID NO: 3791 - protein, 7 aa, synthetic construct
  REGION 1..7: note = n-mer motif
FIANTNP

SEQ ID NO: 3792 - protein, 7 aa, synthetic construct
  REGION 1..7: note = n-mer motif
GLHGTNA

SEQ ID NO: 3793 - protein, 7 aa, synthetic construct
  REGION 1..7: note = n-mer motif
KTIDIAQ

SEQ ID NO: 3794 - protein, 7 aa, synthetic construct
  REGION 1..7: note = n-mer motif
SSDSRIP

SEQ ID NO: 3795 - protein, 7 aa, synthetic construct
  REGION 1..7: note = n-mer motif
STSPVNS

SEQ ID NO: 3796 - protein, 7 aa, synthetic construct
  REGION 1..7: note = n-mer motif
ASMPSVD

SEQ ID NO: 3797 - protein, 7 aa, synthetic construct
  REGION 1..7: note = n-mer motif
GHNMAQA

SEQ ID NO: 3798 - protein, 7 aa, synthetic construct
  REGION 1..7: note = n-mer motif
HNKPNGD

SEQ ID NO: 3799 - protein, 7 aa, synthetic construct
  REGION 1..7: note = n-mer motif
YRMETNP

SEQ ID NO: 3800 - protein, 7 aa, synthetic construct
  REGION 1..7: note = n-mer motif
LGNVVHP

SEQ ID NO: 3801 - protein, 7 aa, synthetic construct
  REGION 1..7: note = n-mer motif
VTAHQLS

SEQ ID NO: 3802 - protein, 7 aa, synthetic construct
  REGION 1..7: note = n-mer motif
TMVEVLP

SEQ ID NO: 3803 - protein, 7 aa, synthetic construct
  REGION 1..7: note = n-mer motif
IKGSGSQ

SEQ ID NO: 3804 - protein, 7 aa, synthetic construct
  REGION 1..7: note = n-mer motif
TNGGSLN

SEQ ID NO: 3805 - protein, 7 aa, synthetic construct
  REGION 1..7: note = n-mer motif
LGGNSRI

SEQ ID NO: 3806 - protein, 7 aa, synthetic construct
  REGION 1..7: note = n-mer motif
RGDAANK

SEQ ID NO: 3807 - protein, 7 aa, synthetic construct
  REGION 1..7: note = n-mer motif
ALNAQGI

SEQ ID NO: 3808 - protein, 7 aa, synthetic construct
  REGION 1..7: note = n-mer motif
AEHATSS

SEQ ID NO: 3809 - protein, 7 aa, synthetic construct
  REGION 1..7: note = n-mer motif
YLTTGTA

SEQ ID NO: 3810 - protein, 7 aa, synthetic construct
  REGION 1..7: note = n-mer motif
AEAQTRV

SEQ ID NO: 3811 - protein, 7 aa, synthetic construct
  REGION 1..7: note = n-mer motif
AEQGLSS

SEQ ID NO: 3812 - protein, 7 aa, synthetic construct
  REGION 1..7: note = n-mer motif
LIVTQHV

SEQ ID NO: 3813 - protein, 7 aa, synthetic construct
  REGION 1..7: note = n-mer motif
SSYQSGL

SEQ ID NO: 3814 - protein, 7 aa, synthetic construct
  REGION 1..7: note = n-mer motif
ATVYNEL

SEQ ID NO: 3815 - protein, 7 aa, synthetic construct
  REGION 1..7: note = n-mer motif
HDTVGER

SEQ ID NO: 3816 - protein, 7 aa, synthetic construct
  REGION 1..7: note = n-mer motif
RGDLNDS

SEQ ID NO: 3817 - protein, 7 aa, synthetic construct
  REGION 1..7: note = n-mer motif
HDISLDR

SEQ ID NO: 3818 - protein, 7 aa, synthetic construct
  REGION 1..7: note = n-mer motif
TEQSYSR

SEQ ID NO: 3819 - protein, 6 aa, synthetic construct
  REGION 1..6: note = n-mer motif
WGAEFA

SEQ ID NO: 3820 - protein, 7 aa, synthetic construct
  REGION 1..7: note = n-mer motif
AVHATSR

SEQ ID NO: 3821 - protein, 7 aa, synthetic construct
  REGION 1..7: note = n-mer motif
IESKTVQ

SEQ ID NO: 3822 - protein, 7 aa, synthetic construct
  REGION 1..7: note = n-mer motif
TNVSTLL

SEQ ID NO: 3823 - protein, 7 aa, synthetic construct
  REGION 1..7: note = n-mer motif
PPNGSSR

SEQ ID NO: 3824 - protein, 7 aa, synthetic construct
  REGION 1..7: note = n-mer motif
PSTHGYV

SEQ ID NO: 3825 - protein, 7 aa, synthetic construct
  REGION 1..7: note = n-mer motif
TAASTAR

SEQ ID NO: 3826 - protein, 7 aa, synthetic construct
  REGION 1..7: note = n-mer motif
YNAGGEQ

SEQ ID NO: 3827 - protein, 7 aa, synthetic construct
  REGION 1..7: note = n-mer motif
THNQREL

SEQ ID NO: 3828 - protein, 7 aa, synthetic construct
  REGION 1..7: note = n-mer motif
TFTVDGR

SEQ ID NO: 3829 - protein, 7 aa, synthetic construct
  REGION 1..7: note = n-mer motif
HSSPGSS

SEQ ID NO: 3830 - protein, 7 aa, synthetic construct
  REGION 1..7: note = n-mer motif
STSGYNT

SEQ ID NO: 3831 - protein, 7 aa, synthetic construct
  REGION 1..7: note = n-mer motif
SEKLTDK

SEQ ID NO: 3832 - protein, 7 aa, synthetic construct
  REGION 1..7: note = n-mer motif
GRNTSNL

SEQ ID NO: 3833 - protein, 7 aa, synthetic construct
  REGION 1..7: note = n-mer motif
TGTAISR

SEQ ID NO: 3834 - protein, 7 aa, synthetic construct
  REGION 1..7: note = n-mer motif
SMQDPSL

SEQ ID NO: 3835 - protein, 7 aa, synthetic construct
  REGION 1..7: note = n-mer motif
TRSDIGV

SEQ ID NO: 3836 - protein, 7 aa, synthetic construct
  REGION 1..7: note = n-mer motif
TQNHQLS

SEQ ID NO: 3837 - protein, 7 aa, synthetic construct
  REGION 1..7: note = n-mer motif
FVDNRQP

SEQ ID NO: 3838 - protein, 7 aa, synthetic construct
  REGION 1..7: note = n-mer motif
SLNSSST

SEQ ID NO: 3839 - protein, 7 aa, synthetic construct
  REGION 1..7: note = n-mer motif
KAVSEII

SEQ ID NO: 3840 - protein, 7 aa, synthetic construct
  REGION 1..7: note = n-mer motif
GTSDNYR

SEQ ID NO: 3841 - protein, 7 aa, synthetic construct
  REGION 1..7: note = n-mer motif
MSSHTVQ

SEQ ID NO: 3842 - protein, 7 aa, synthetic construct
  REGION 1..7: note = n-mer motif
SITHSNT

SEQ ID NO: 3843 - protein, 7 aa, synthetic construct
  REGION 1..7: note = n-mer motif
VQTSTGA

SEQ ID NO: 3844 - protein, 7 aa, synthetic construct
  REGION 1..7: note = n-mer motif
RGDMTRA

SEQ ID NO: 3845 - protein, 7 aa, synthetic construct
  REGION 1..7: note = n-mer motif
IGLQNST

SEQ ID NO: 3846 - protein, 7 aa, synthetic construct
  REGION 1..7: note = n-mer motif
SADRDNK

SEQ ID NO: 3847 - protein, 7 aa, synthetic construct
  REGION 1..7: note = n-mer motif
YSQSIKN

SEQ ID NO: 3848 - protein, 7 aa, synthetic construct
  REGION 1..7: note = n-mer motif
RSLDSGM

SEQ ID NO: 3849 - protein, 7 aa, synthetic construct
  REGION 1..7: note = n-mer motif
AVPQSLP

SEQ ID NO: 3850 - protein, 7 aa, synthetic construct
  REGION 1..7: note = n-mer motif
ANDSIKL

SEQ ID NO: 3851 - protein, 7 aa, synthetic construct
  REGION 1..7: note = n-mer motif
NGNIYPS

SEQ ID NO: 3852 - protein, 7 aa, synthetic construct
  REGION 1..7: note = n-mer motif
GQTNAVH

SEQ ID NO: 3853 - protein, 7 aa, synthetic construct
  REGION 1..7: note = n-mer motif
QGDLRGS

SEQ ID NO: 3854 - protein, 7 aa, synthetic construct
  REGION 1..7: note = n-mer motif
VKASAGV

SEQ ID NO: 3855 - protein, 7 aa, synthetic construct
  REGION 1..7: note = n-mer motif
IASTWNM

SEQ ID NO: 3856 - protein, 7 aa, synthetic construct
  REGION 1..7: note = n-mer motif
NSAESSR

SEQ ID NO: 3857 - protein, 7 aa, synthetic construct
  REGION 1..7: note = n-mer motif
VFTGQTE

SEQ ID NO: 3858 - protein, 7 aa, synthetic construct
  REGION 1..7: note = n-mer motif
FGTSYTT

SEQ ID NO: 3859 - protein, 7 aa, synthetic construct
  REGION 1..7: note = n-mer motif
AVNETRL

SEQ ID NO: 3860 - protein, 7 aa, synthetic construct
  REGION 1..7: note = n-mer motif
GRTDTPN

SEQ ID NO: 3861 - protein, 7 aa, synthetic construct
  REGION 1..7: note = n-mer motif
NDRPLAS

SEQ ID NO: 3862 - protein, 7 aa, synthetic construct
  REGION 1..7: note = n-mer motif
AYQLTPA

SEQ ID NO: 3863 - protein, 7 aa, synthetic construct
  REGION 1..7: note = n-mer motif
MGEMGNI

SEQ ID NO: 3864 - protein, 7 aa, synthetic construct
  REGION 1..7: note = n-mer motif
ADMQHTV

SEQ ID NO: 3865 - protein, 7 aa, synthetic construct
  REGION 1..7: note = n-mer motif
AVVLNSN

SEQ ID NO: 3866 - protein, 7 aa, synthetic construct
  REGION 1..7: note = n-mer motif
FRDGQGM

SEQ ID NO: 3867 - protein, 7 aa, synthetic construct
  REGION 1..7: note = n-mer motif
KSTSNIE

SEQ ID NO: 3868 - protein, 7 aa, synthetic construct
  REGION 1..7: note = n-mer motif
TQAFSLG

SEQ ID NO: 3869 - protein, 7 aa, synthetic construct
  REGION 1..7: note = n-mer motif
WSRTGNT

SEQ ID NO: 3870 - protein, 7 aa, synthetic construct
  REGION 1..7: note = n-mer motif
STNTEPR

SEQ ID NO: 3871 - protein, 7 aa, synthetic construct
  REGION 1..7: note = n-mer motif
ENSDLSY

SEQ ID NO: 3872 - protein, 7 aa, synthetic construct
  REGION 1..7: note = n-mer motif
IDERSSI

SEQ ID NO: 3873 - protein, 7 aa, synthetic construct
  REGION 1..7: note = n-mer motif
DVHSSIP

SEQ ID NO: 3874 - protein, 7 aa, synthetic construct
  REGION 1..7: note = n-mer motif
ISGSTTH

SEQ ID NO: 3875 - protein, 7 aa, synthetic construct
  REGION 1..7: note = n-mer motif
WQTQVTT

SEQ ID NO: 3876 - protein, 7 aa, synthetic construct
  REGION 1..7: note = n-mer motif
NMGPMGR

SEQ ID NO: 3877 - protein, 7 aa, synthetic construct
  REGION 1..7: note = n-mer motif
VTQSSTL

SEQ ID NO: 3878 - protein, 7 aa, synthetic construct
  REGION 1..7: note = n-mer motif
IDRSASL

SEQ ID NO: 3879 - protein, 7 aa, synthetic construct
  REGION 1..7: note = n-mer motif
SHSITGL

SEQ ID NO: 3880 - protein, 7 aa, synthetic construct
  REGION 1..7: note = n-mer motif
KAGQLVE

SEQ ID NO: 3881 - protein, 7 aa, synthetic construct
  REGION 1..7: note = n-mer motif
SGVSEGN

SEQ ID NO: 3882 - protein, 7 aa, synthetic construct
  REGION 1..7: note = n-mer motif
TLTLSTL

SEQ ID NO: 3883 - protein, 7 aa, synthetic construct
  REGION 1..7: note = n-mer motif
AHNKHES

SEQ ID NO: 3884 - protein, 7 aa, synthetic construct
  REGION 1..7: note = n-mer motif
HNNNLQN

SEQ ID NO: 3885 - protein, 7 aa, synthetic construct
  REGION 1..7: note = n-mer motif
YNESSNA

SEQ ID NO: 3886 - protein, 7 aa, synthetic construct
  REGION 1..7: note = n-mer motif
REQAAER

SEQ ID NO: 3887 - protein, 7 aa, synthetic construct
  REGION 1..7: note = n-mer motif
TQYGTLP

SEQ ID NO: 3888 - protein, 7 aa, synthetic construct
  REGION 1..7: note = n-mer motif
HPGNSSV

SEQ ID NO: 3889 - protein, 7 aa, synthetic construct
  REGION 1..7: note = n-mer motif
SSREVSP

SEQ ID NO: 3890 - protein, 7 aa, synthetic construct
  REGION 1..7: note = n-mer motif
ANSTSQW

SEQ ID NO: 3891 - protein, 7 aa, synthetic construct
  REGION 1..7: note = n-mer motif
RDMINSS

SEQ ID NO: 3892 - protein, 7 aa, synthetic construct
  REGION 1..7: note = n-mer motif
ALPSGAR

SEQ ID NO: 3893 - protein, 7 aa, synthetic construct
  REGION 1..7: note = n-mer motif
PGTSGSR

SEQ ID NO: 3894 - protein, 7 aa, synthetic construct
  REGION 1..7: note = n-mer motif
WNGNATQ

SEQ ID NO: 3895 - protein, 7 aa, synthetic construct
  REGION 1..7: note = n-mer motif
GKATLVL

SEQ ID NO: 3896 - protein, 7 aa, synthetic construct
  REGION 1..7: note = n-mer motif
YTNGGHL

SEQ ID NO: 3897 - protein, 7 aa, synthetic construct
  REGION 1..7: note = n-mer motif
SQYNGTQ

SEQ ID NO: 3898 - protein, 7 aa, synthetic construct
  REGION 1..7: note = n-mer motif
YSSESAY

SEQ ID NO: 3899 - protein, 7 aa, synthetic construct
  REGION 1..7: note = n-mer motif
VKAGVAD

SEQ ID NO: 3900 - protein, 7 aa, synthetic construct
  REGION 1..7: note = n-mer motif
TMGTVQI

SEQ ID NO: 3901 - protein, 7 aa, synthetic construct
  REGION 1..7: note = n-mer motif
GVAGAVV

SEQ ID NO: 3902 - protein, 7 aa, synthetic construct
  REGION 1..7: note = n-mer motif
YDKTLSV

SEQ ID NO: 3903 - protein, 7 aa, synthetic construct
  REGION 1..7: note = n-mer motif
HGSAYSQ

SEQ ID NO: 3904 - protein, 7 aa, synthetic construct
  REGION 1..7: note = n-mer motif
TANIMSK

SEQ ID NO: 3905 - protein, 7 aa, synthetic construct
  REGION 1..7: note = n-mer motif
FSRETLA

SEQ ID NO: 3906 - protein, 7 aa, synthetic construct
  REGION 1..7: note = n-mer motif
LSGAGSQ

SEQ ID NO: 3907 - protein, 7 aa, synthetic construct
  REGION 1..7: note = n-mer motif
SNANQMS

SEQ ID NO: 3908 - protein, 7 aa, synthetic construct
  REGION 1..7: note = n-mer motif
SVLSPSN

SEQ ID NO: 3909 - protein, 7 aa, synthetic construct
  REGION 1..7: note = n-mer motif
DNVHGQV

SEQ ID NO: 3910 - protein, 7 aa, synthetic construct
  REGION 1..7: note = n-mer motif
DGREYAS

SEQ ID NO: 3911 - protein, 7 aa, synthetic construct
  REGION 1..7: note = n-mer motif
ISNQIKM

SEQ ID NO: 3912 - protein, 7 aa, synthetic construct
  REGION 1..7: note = n-mer motif
GRDNQHV

SEQ ID NO: 3913 - protein, 7 aa, synthetic construct
  REGION 1..7: note = n-mer motif
RNHETGA

SEQ ID NO: 3914 - protein, 7 aa, synthetic construct
  REGION 1..7: note = n-mer motif
SGSGANI

SEQ ID NO: 3915 - protein, 7 aa, synthetic construct
  REGION 1..7: note = n-mer motif
SMSDGLR

SEQ ID NO: 3916 - protein, 7 aa, synthetic construct
  REGION 1..7: note = n-mer motif
KESSAME

SEQ ID NO: 3917 - protein, 7 aa, synthetic construct
  REGION 1..7: note = n-mer motif
ANASTSL

SEQ ID NO: 3918 - protein, 7 aa, synthetic construct
  REGION 1..7: note = n-mer motif
SASGYLV

SEQ ID NO: 3919 - protein, 7 aa, synthetic construct
  REGION 1..7: note = n-mer motif
DTTQKPH

SEQ ID NO: 3920 - protein, 7 aa, synthetic construct
  REGION 1..7: note = n-mer motif
LIRGSME

SEQ ID NO: 3921 - protein, 7 aa, synthetic construct
  REGION 1..7: note = n-mer motif
DRTYSNT

SEQ ID NO: 3922 - protein, 7 aa, synthetic construct
  REGION 1..7: note = n-mer motif
ALGHQGN

SEQ ID NO: 3923 - protein, 7 aa, synthetic construct
  REGION 1..7: note = n-mer motif
ANHTSQE

SEQ ID NO: 3924 - protein, 7 aa, synthetic construct
  REGION 1..7: note = n-mer motif
ERGLNTN

SEQ ID NO: 3925 - protein, 7 aa, synthetic construct
  REGION 1..7: note = n-mer motif
TVGGNHH

SEQ ID NO: 3926 - protein, 7 aa, synthetic construct
  REGION 1..7: note = n-mer motif
PSDRTTY

SEQ ID NO: 3927 - protein, 7 aa, synthetic construct
  REGION 1..7: note = n-mer motif
SRQENFS

SEQ ID NO: 3928 - protein, 7 aa, synthetic construct
  REGION 1..7: note = n-mer motif
NKTTMEF

SEQ ID NO: 3929 - protein, 7 aa, synthetic construct
  REGION 1..7: note = n-mer motif
KHTENGT

SEQ ID NO: 3930 - protein, 7 aa, synthetic construct
  REGION 1..7: note = n-mer motif
ETGAMTS

SEQ ID NO: 3931 - protein, 7 aa, synthetic construct
  REGION 1..7: note = n-mer motif
GHRDSGG

SEQ ID NO: 3932 - protein, 7 aa, synthetic construct
  REGION 1..7: note = n-mer motif
RNAEGGL

SEQ ID NO: 3933 - protein, 7 aa, synthetic construct
  REGION 1..7: note = n-mer motif
GQRTTND

SEQ ID NO: 3934 - protein, 7 aa, synthetic construct
  REGION 1..7: note = n-mer motif
YNDALRP

SEQ ID NO: 3935 - protein, 7 aa, synthetic construct
  REGION 1..7: note = n-mer motif
GYATTVQ

SEQ ID NO: 3936 - protein, 7 aa, synthetic construct
  REGION 1..7: note = n-mer motif
IGGGIGN

SEQ ID NO: 3937 - protein, 7 aa, synthetic construct
  REGION 1..7: note = n-mer motif
VAVSNTP

SEQ ID NO: 3938 - protein, 7 aa, synthetic construct
  REGION 1..7: note = n-mer motif
LANGMTA

SEQ ID NO: 3939 - protein, 7 aa, synthetic construct
  REGION 1..7: note = n-mer motif
ISGSSSL

SEQ ID NO: 3940 - protein, 7 aa, synthetic construct
  REGION 1..7: note = n-mer motif
SNVHVVN

SEQ ID NO: 3941 - protein, 7 aa, synthetic construct
  REGION 1..7: note = n-mer motif
VETSRLY

SEQ ID NO: 3942 - protein, 7 aa, synthetic construct
  REGION 1..7: note = n-mer motif
SNADILA

SEQ ID NO: 3943 - protein, 7 aa, synthetic construct
  REGION 1..7: note = n-mer motif
NNVNPYS

SEQ ID NO: 3944 - protein, 7 aa, synthetic construct
  REGION 1..7: note = n-mer motif
ISVGVSV

SEQ ID NO: 3945 - protein, 7 aa, synthetic construct
  REGION 1..7: note = n-mer motif
SANNIAP

SEQ ID NO: 3946 - protein, 7 aa, synthetic construct
  REGION 1..7: note = n-mer motif
GVQMTAG

SEQ ID NO: 3947 - protein, 7 aa, synthetic construct
  REGION 1..7: note = n-mer motif
RYIANQT

SEQ ID NO: 3948 - protein, 7 aa, synthetic construct
  REGION 1..7: note = n-mer motif
TTESLHL

SEQ ID NO: 3949 - protein, 7 aa, synthetic construct
  REGION 1..7: note = n-mer motif
GYQDKTR

SEQ ID NO: 3950 - protein, 7 aa, synthetic construct
  REGION 1..7: note = n-mer motif
ASRPAAQ

SEQ ID NO: 3951 - protein, 7 aa, synthetic construct
  REGION 1..7: note = n-mer motif
SIQELLR

SEQ ID NO: 3952 - protein, 7 aa, synthetic construct
  REGION 1..7: note = n-mer motif
TVRSPQQ

SEQ ID NO: 3953 - protein, 7 aa, synthetic construct
  REGION 1..7: note = n-mer motif
AVLGGSN

SEQ ID NO: 3954 - protein, 7 aa, synthetic construct
  REGION 1..7: note = n-mer motif
MSTVLRE

SEQ ID NO: 3955 - protein, 7 aa, synthetic construct
  REGION 1..7: note = n-mer motif
TYGITHD

SEQ ID NO: 3956 - protein, 7 aa, synthetic construct
  REGION 1..7: note = n-mer motif
DANAGTR

SEQ ID NO: 3957 - protein, 7 aa, synthetic construct
  REGION 1..7: note = n-mer motif
FNGYVMA

SEQ ID NO: 3958 - protein, 7 aa, synthetic construct
  REGION 1..7: note = n-mer motif
INNFNTL

SEQ ID NO: 3959 - protein, 7 aa, synthetic construct
  REGION 1..7: note = n-mer motif
VANERLP

SEQ ID NO: 3960 - protein, 7 aa, synthetic construct
  REGION 1..7: note = n-mer motif
TNSNQGS

SEQ ID NO: 3961 - protein, 7 aa, synthetic construct
  REGION 1..7: note = n-mer motif
ATLNNSY

SEQ ID NO: 3962 - protein, 7 aa, synthetic construct
  REGION 1..7: note = n-mer motif
KNAQIDL

SEQ ID NO: 3963 - protein, 7 aa, synthetic construct
  REGION 1..7: note = n-mer motif
PATLHLT

SEQ ID NO: 3964 - protein, 7 aa, synthetic construct
  REGION 1..7: note = n-mer motif
LGSSTVS

SEQ ID NO: 3965 - protein, 7 aa, synthetic construct
  REGION 1..7: note = n-mer motif
NWNSEGT

SEQ ID NO: 3966 - protein, 7 aa, synthetic construct
  REGION 1..7: note = n-mer motif
PTNNLSM

SEQ ID NO: 3967 - protein, 7 aa, synthetic construct
  REGION 1..7: note = n-mer motif
ALKPNST

SEQ ID NO: 3968 - protein, 7 aa, synthetic construct
  REGION 1..7: note = n-mer motif
MVNSENT

SEQ ID NO: 3969 - protein, 7 aa, synthetic construct
  REGION 1..7: note = n-mer motif
SMDARLT

SEQ ID NO: 3970 - protein, 7 aa, synthetic construct
  REGION 1..7: note = n-mer motif
NNVVRDD

SEQ ID NO: 3971 - protein, 7 aa, synthetic construct
  REGION 1..7: note = n-mer motif
TRDQRST

SEQ ID NO: 3972 - protein, 7 aa, synthetic construct
  REGION 1..7: note = n-mer motif
ADIRNDK

SEQ ID NO: 3973 - protein, 7 aa, synthetic construct
  REGION 1..7: note = n-mer motif
MRDKINP

SEQ ID NO: 3974 - protein, 7 aa, synthetic construct
  REGION 1..7: note = n-mer motif
PTPNEHM

SEQ ID NO: 3975 - protein, 7 aa, synthetic construct
  REGION 1..7: note = n-mer motif
GYSHNSD

SEQ ID NO: 3976 - protein, 7 aa, synthetic construct
  REGION 1..7: note = n-mer motif
LRDGIAS

SEQ ID NO: 3977 - protein, 7 aa, synthetic construct
  REGION 1..7: note = n-mer motif
MNQMGGL

SEQ ID NO: 3978 - protein, 7 aa, synthetic construct
  REGION 1..7: note = n-mer motif
SSPTKGT

SEQ ID NO: 3979 - protein, 7 aa, synthetic construct
  REGION 1..7: note = n-mer motif
YLDNPLT

SEQ ID NO: 3980 - protein, 7 aa, synthetic construct
  REGION 1..7: note = n-mer motif
VMQRSAQ

SEQ ID NO: 3981 - protein, 7 aa, synthetic construct
  REGION 1..7: note = n-mer motif
SLQLTAG

SEQ ID NO: 3982 - protein, 7 aa, synthetic construct
  REGION 1..7: note = n-mer motif
VGSGGYN

SEQ ID NO: 3983 - protein, 7 aa, synthetic construct
  REGION 1..7: note = n-mer motif
DRPNNVS

SEQ ID NO: 3984 - protein, 7 aa, synthetic construct
  REGION 1..7: note = n-mer motif
LTEKASI

SEQ ID NO: 3985 - protein, 7 aa, synthetic construct
  REGION 1..7: note = n-mer motif
TTKTTSM

SEQ ID NO: 3986 - protein, 7 aa, synthetic construct
  REGION 1..7: note = n-mer motif
RLDLQVH

SEQ ID NO: 3987 - protein, 7 aa, synthetic construct
  REGION 1..7: note = n-mer motif
THVIGAV

SEQ ID NO: 3988 - protein, 7 aa, synthetic construct
  REGION 1..7: note = n-mer motif
TLTHLNP

SEQ ID NO: 3989 - protein, 7 aa, synthetic construct
  REGION 1..7: note = n-mer motif
TSISSQS

SEQ ID NO: 3990 - protein, 7 aa, synthetic construct
  REGION 1..7: note = n-mer motif
YHTHQVA

SEQ ID NO: 3991 - protein, 7 aa, synthetic construct
  REGION 1..7: note = n-mer motif
MQGLNNM

SEQ ID NO: 3992 - protein, 7 aa, synthetic construct
  REGION 1..7: note = n-mer motif
GSASNSG

SEQ ID NO: 3993 - protein, 7 aa, synthetic construct
  REGION 1..7: note = n-mer motif
ANTTGQV

SEQ ID NO: 3994 - protein, 7 aa, synthetic construct
  REGION 1..7: note = n-mer motif
SVVNTNI

SEQ ID NO: 3995 - protein, 7 aa, synthetic construct
  REGION 1..7: note = n-mer motif
SNNLNQE

SEQ ID NO: 3996 - protein, 7 aa, synthetic construct
  REGION 1..7: note = n-mer motif
MNGSGMQ

SEQ ID NO: 3997 - protein, 7 aa, synthetic construct
  REGION 1..7: note = n-mer motif
ISHDLKY

SEQ ID NO: 3998 - protein, 7 aa, synthetic construct
  REGION 1..7: note = n-mer motif
TVNADGS

SEQ ID NO: 3999 - protein, 7 aa, synthetic construct
  REGION 1..7: note = n-mer motif
NHIRNPM

SEQ ID NO: 4000 - protein, 7 aa, synthetic construct
  REGION 1..7: note = n-mer motif
STRVTLD

SEQ ID NO: 4001 - protein, 7 aa, synthetic construct
  REGION 1..7: note = n-mer motif
AMGALVH

SEQ ID NO: 4002 - protein, 7 aa, synthetic construct
  REGION 1..7: note = n-mer motif
AQAMSNS

SEQ ID NO: 4003 - protein, 7 aa, synthetic construct
  REGION 1..7: note = n-mer motif
NANGMNT

SEQ ID NO: 4004 - protein, 7 aa, synthetic construct
  REGION 1..7: note = n-mer motif
LTLPSAN

SEQ ID NO: 4005 - protein, 7 aa, synthetic construct
  REGION 1..7: note = n-mer motif
YQTGDKD

SEQ ID NO: 4006 - protein, 7 aa, synthetic construct
  REGION 1..7: note = n-mer motif
RREENVN

SEQ ID NO: 4007 - protein, 7 aa, synthetic construct
  REGION 1..7: note = n-mer motif
GTTTAVA

SEQ ID NO: 4008 - protein, 7 aa, synthetic construct
  REGION 1..7: note = n-mer motif
TAGGERA

SEQ ID NO: 4009 - protein, 7 aa, synthetic construct
  REGION 1..7: note = n-mer motif
AGNEPRP

SEQ ID NO: 4010 - protein, 7 aa, synthetic construct
  REGION 1..7: note = n-mer motif
ANNTANS

SEQ ID NO: 4011 - protein, 7 aa, synthetic construct
  REGION 1..7: note = n-mer motif
HVNSRDL

SEQ ID NO: 4012 - protein, 7 aa, synthetic construct
  REGION 1..7: note = n-mer motif
TYQLSGN

SEQ ID NO: 4013 - protein, 7 aa, synthetic construct
  REGION 1..7: note = n-mer motif
RGDSMAR

SEQ ID NO: 4014 - protein, 7 aa, synthetic construct
  REGION 1..7: note = n-mer motif
LNNSATV

SEQ ID NO: 4015 - protein, 7 aa, synthetic construct
  REGION 1..7: note = n-mer motif
LHANNER

SEQ ID NO: 4016 - protein, 7 aa, synthetic construct
  REGION 1..7: note = n-mer motif
MGSTTGV

SEQ ID NO: 4017 - protein, 7 aa, synthetic construct
  REGION 1..7: note = n-mer motif
VVAGHAM

SEQ ID NO: 4018 - protein, 7 aa, synthetic construct
  REGION 1..7: note = n-mer motif
GNEKPSG

SEQ ID NO: 4019 - protein, 7 aa, synthetic construct
  REGION 1..7: note = n-mer motif
RGTEGTP

SEQ ID NO: 4020 - protein, 7 aa, synthetic construct
  REGION 1..7: note = n-mer motif
WSPGPEA

SEQ ID NO: 4021 - protein, 7 aa, synthetic construct
  REGION 1..7: note = n-mer motif
INVNQMA

SEQ ID NO: 4022 - protein, 7 aa, synthetic construct
  REGION 1..7: note = n-mer motif
RSDVMQS

SEQ ID NO: 4023 - protein, 7 aa, synthetic construct
  REGION 1..7: note = n-mer motif
RDVSTKE

SEQ ID NO: 4024 - protein, 7 aa, synthetic construct
  REGION 1..7: note = n-mer motif
KKSPRLE

SEQ ID NO: 4025 - protein, 7 aa, synthetic construct
  REGION 1..7: note = n-mer motif
TSNTMSD

SEQ ID NO: 4026 - protein, 7 aa, synthetic construct
  REGION 1..7: note = n-mer motif
SKGNEQM

SEQ ID NO: 4027 - protein, 7 aa, synthetic construct
  REGION 1..7: note = n-mer motif
GYATTVQ

SEQ ID NO: 4028 - protein, 7 aa, synthetic construct
  REGION 1..7: note = n-mer motif
GYMSNVI

SEQ ID NO: 4029 - protein, 7 aa, synthetic construct
  REGION 1..7: note = n-mer motif
VTVSLDG

SEQ ID NO: 4030 - protein, 7 aa, synthetic construct
  REGION 1..7: note = n-mer motif
TNNLLAQ

SEQ ID NO: 4031 - protein, 7 aa, synthetic construct
  REGION 1..7: note = n-mer motif
AQTTGYT

SEQ ID NO: 4032 - protein, 7 aa, synthetic construct
  REGION 1..7: note = n-mer motif
SKSTEIM

SEQ ID NO: 4033 - protein, 7 aa, synthetic construct
  REGION 1..7: note = n-mer motif
SAMHTLV

SEQ ID NO: 4034 - protein, 7 aa, synthetic construct
  REGION 1..7: note = n-mer motif
AGVRESF

SEQ ID NO: 4035 - protein, 7 aa, synthetic construct
  REGION 1..7: note = n-mer motif
QGNSMAS

SEQ ID NO: 4036 - protein, 7 aa, synthetic construct
  REGION 1..7: note = n-mer motif
KNPSVQE

SEQ ID NO: 4037 - protein, 7 aa, synthetic construct
  REGION 1..7: note = n-mer motif
PITRESG

SEQ ID NO: 4038 - protein, 7 aa, synthetic construct
  REGION 1..7: note = n-mer motif
SRSAEIS

SEQ ID NO: 4039 - protein, 7 aa, synthetic construct
  REGION 1..7: note = n-mer motif
NDIPTRA

SEQ ID NO: 4040 - protein, 7 aa, synthetic construct
  REGION 1..7: note = n-mer motif
AYGSSGR

SEQ ID NO: 4041 - protein, 7 aa, synthetic construct
  REGION 1..7: note = n-mer motif
LHGNFSQ

SEQ ID NO: 4042 - protein, 7 aa, synthetic construct
  REGION 1..7: note = n-mer motif
ASNGQVN

SEQ ID NO: 4043 - protein, 7 aa, synthetic construct
  REGION 1..7: note = n-mer motif
QKGTVTL

SEQ ID NO: 4044 - protein, 7 aa, synthetic construct
  REGION 1..7: note = n-mer motif
NSSNTGW

SEQ ID NO: 4045 - protein, 7 aa, synthetic construct
  REGION 1..7: note = n-mer motif
TYQHQGP

SEQ ID NO: 4046 - protein, 7 aa, synthetic construct
  REGION 1..7: note = n-mer motif
DGVAHRS

SEQ ID NO: 4047 - protein, 7 aa, synthetic construct
  REGION 1..7: note = n-mer motif
DGLTLER

SEQ ID NO: 4048 - protein, 7 aa, synthetic construct
  REGION 1..7: note = n-mer motif
RGDLSTP

SEQ ID NO: 4049 - protein, 7 aa, synthetic construct
  REGION 1..7: note = n-mer motif
INEIGRM

SEQ ID NO: 4050 - protein, 7 aa, synthetic construct
  REGION 1..7: note = n-mer motif
PQWGTDP

SEQ ID NO: 4051 - protein, 7 aa, synthetic construct
  REGION 1..7: note = n-mer motif
KQVAHID

SEQ ID NO: 4052 - protein, 7 aa, synthetic construct
  REGION 1..7: note = n-mer motif
NTLQNSH

SEQ ID NO: 4053 - protein, 7 aa, synthetic construct
  REGION 1..7: note = n-mer motif
WSQGNTA

SEQ ID NO: 4054 - protein, 7 aa, synthetic construct
  REGION 1..7: note = n-mer motif
NETHVPK

SEQ ID NO: 4055 - protein, 7 aa, synthetic construct
  REGION 1..7: note = n-mer motif
VTNESRA

SEQ ID NO: 4056 - protein, 7 aa, synthetic construct
  REGION 1..7: note = n-mer motif
PEGHMQD

SEQ ID NO: 4057 - protein, 7 aa, synthetic construct
  REGION 1..7: note = n-mer motif
LDSTNSR

SEQ ID NO: 4058 - protein, 7 aa, synthetic construct
  REGION 1..7: note = n-mer motif
QSIGHPV

SEQ ID NO: 4059 - protein, 7 aa, synthetic construct
  REGION 1..7: note = n-mer motif
VLVNVHN

SEQ ID NO: 4060 - protein, 7 aa, synthetic construct
  REGION 1..7: note = n-mer motif
VHNPTTT

SEQ ID NO: 4061 - protein, 7 aa, synthetic construct
  REGION 1..7: note = n-mer motif
GDKASLA

SEQ ID NO: 4062 - protein, 7 aa, synthetic construct
  REGION 1..7: note = n-mer motif
LNESRAS

SEQ ID NO: 4063 - protein, 7 aa, synthetic construct
  REGION 1..7: note = n-mer motif
GFHINGE

SEQ ID NO: 4064 - protein, 7 aa, synthetic construct
  REGION 1..7: note = n-mer motif
SVSSVVL

SEQ ID NO: 4065 - protein, 7 aa, synthetic construct
  REGION 1..7: note = n-mer motif
LSTTSTK

SEQ ID NO: 4066 - protein, 7 aa, synthetic construct
  REGION 1..7: note = n-mer motif
TNTQNNP

SEQ ID NO: 4067 - protein, 7 aa, synthetic construct
  REGION 1..7: note = n-mer motif
TNLAVTL

SEQ ID NO: 4068 - protein, 7 aa, synthetic construct
  REGION 1..7: note = n-mer motif
MSDRTSD

SEQ ID NO: 4069 - protein, 7 aa, synthetic construct
  REGION 1..7: note = n-mer motif
SAQSFVV

SEQ ID NO: 4070 - protein, 7 aa, synthetic construct
  REGION 1..7: note = n-mer motif
MHTSRPP

SEQ ID NO: 4071 - protein, 7 aa, synthetic construct
  REGION 1..7: note = n-mer motif
MSSHTVQ

SEQ ID NO: 4072 - protein, 7 aa, synthetic construct
  REGION 1..7: note = n-mer motif
RDTAKGV

SEQ ID NO: 4073 - protein, 7 aa, synthetic construct
  REGION 1..7: note = n-mer motif
ALKSDSA

SEQ ID NO: 4074 - protein, 7 aa, synthetic construct
  REGION 1..7: note = n-mer motif
QYDASRQ

SEQ ID NO: 4075 - protein, 7 aa, synthetic construct
  REGION 1..7: note = n-mer motif
LADSNSK

SEQ ID NO: 4076 - protein, 7 aa, synthetic construct
  REGION 1..7: note = n-mer motif
FQLASNP

SEQ ID NO: 4077 - protein, 7 aa, synthetic construct
  REGION 1..7: note = n-mer motif
NSVVGNI

SEQ ID NO: 4078 - protein, 7 aa, synthetic construct
  REGION 1..7: note = n-mer motif
RYESTSA

SEQ ID NO: 4079 - protein, 7 aa, synthetic construct
  REGION 1..7: note = n-mer motif
ADHNHIA

SEQ ID NO: 4080 - protein, 7 aa, synthetic construct
  REGION 1..7: note = n-mer motif
VGDQSRP

SEQ ID NO: 4081 - protein, 7 aa, synthetic construct
  REGION 1..7: note = n-mer motif
FNETAGR

SEQ ID NO: 4082 - protein, 7 aa, synthetic construct
  REGION 1..7: note = n-mer motif
SNSYLLN

SEQ ID NO: 4083 - protein, 7 aa, synthetic construct
  REGION 1..7: note = n-mer motif
RGDTKNY

SEQ ID NO: 4084 - protein, 7 aa, synthetic construct
  REGION 1..7: note = n-mer motif
TTTTMAY

SEQ ID NO: 4085 - protein, 7 aa, synthetic construct
  REGION 1..7: note = n-mer motif
RPPNENR

SEQ ID NO: 4086 - protein, 7 aa, synthetic construct
  REGION 1..7: note = n-mer motif
CANMTNG

SEQ ID NO: 4087 - protein, 7 aa, synthetic construct
  REGION 1..7: note = n-mer motif
NRSDSFA

SEQ ID NO: 4088 - protein, 7 aa, synthetic construct
  REGION 1..7: note = n-mer motif
NLLTSSP

SEQ ID NO: 4089 - protein, 7 aa, synthetic construct
  REGION 1..7: note = n-mer motif
NSREMGV

SEQ ID NO: 4090 - protein, 7 aa, synthetic construct
  REGION 1..7: note = n-mer motif
MGNQSGA

SEQ ID NO: 4091 - protein, 7 aa, synthetic construct
  REGION 1..7: note = n-mer motif
MLTETKA

SEQ ID NO: 4092 - protein, 7 aa, synthetic construct
  REGION 1..7: note = n-mer motif
QNIKNMT

SEQ ID NO: 4093 - protein, 7 aa, synthetic construct
  REGION 1..7: note = n-mer motif
MSTVLRE

SEQ ID NO: 4094 - protein, 7 aa, synthetic construct
  REGION 1..7: note = n-mer motif
DRAQNNE

SEQ ID NO: 4095 - protein, 7 aa, synthetic construct
  REGION 1..7: note = n-mer motif
HTQSTGY

SEQ ID NO: 4096 - protein, 7 aa, synthetic construct
  REGION 1..7: note = n-mer motif
MSVGKVY

SEQ ID NO: 4097 - protein, 7 aa, synthetic construct
  REGION 1..7: note = n-mer motif
AGNYQSS

SEQ ID NO: 4098 - protein, 7 aa, synthetic construct
  REGION 1..7: note = n-mer motif
RNENVNA

SEQ ID NO: 4099 - protein, 7 aa, synthetic construct
  REGION 1..7: note = n-mer motif
DTHHTSS

SEQ ID NO: 4100 - protein, 7 aa, synthetic construct
  REGION 1..7: note = n-mer motif
TSSPVLQ

SEQ ID NO: 4101 - protein, 7 aa, synthetic construct
  REGION 1..7: note = n-mer motif
VGRDAEA

SEQ ID NO: 4102 - protein, 7 aa, synthetic construct
  REGION 1..7: note = n-mer motif
NMERGSQ

SEQ ID NO: 4103 - protein, 7 aa, synthetic construct
  REGION 1..7: note = n-mer motif
DRQTGQK

SEQ ID NO: 4104 - protein, 7 aa, synthetic construct
  REGION 1..7: note = n-mer motif
VFREGIV

SEQ ID NO: 4105 - protein, 7 aa, synthetic construct
  REGION 1..7: note = n-mer motif
SANNIAT

SEQ ID NO: 4106 - protein, 7 aa, synthetic construct
  REGION 1..7: note = n-mer motif
VSEGQRI

SEQ ID NO: 4107 - protein, 7 aa, synthetic construct
  REGION 1..7: note = n-mer motif
HYGNKDI

SEQ ID NO: 4108 - protein, 7 aa, synthetic construct
  REGION 1..7: note = n-mer motif
DVLLKNF

SEQ ID NO: 4109 - protein, 7 aa, synthetic construct
  REGION 1..7: note = n-mer motif
HTVQIRE

SEQ ID NO: 4110 - protein, 7 aa, synthetic construct
  REGION 1..7: note = n-mer motif
TSALAHQ

SEQ ID NO: 4111 - protein, 7 aa, synthetic construct
  REGION 1..7: note = n-mer motif
IPTGQTS

SEQ ID NO: 4112 - protein, 7 aa, synthetic construct
  REGION 1..7: note = n-mer motif
RSDKGTL

SEQ ID NO: 4113 - protein, 7 aa, synthetic construct
  REGION 1..7: note = n-mer motif
NGLTVQR

SEQ ID NO: 4114 - protein, 7 aa, synthetic construct
  REGION 1..7: note = n-mer motif
TVEGSYP

SEQ ID NO: 4115 - protein, 7 aa, synthetic construct
  REGION 1..7: note = n-mer motif
TSHLVLA

SEQ ID NO: 4116 - protein, 7 aa, synthetic construct
  REGION 1..7: note = n-mer motif
NHSLSEH

SEQ ID NO: 4117 - protein, 7 aa, synthetic construct
  REGION 1..7: note = n-mer motif
LTGMNRD

SEQ ID NO: 4118 - protein, 7 aa, synthetic construct
  REGION 1..7: note = n-mer motif
SHNAGVA

SEQ ID NO: 4119 - protein, 7 aa, synthetic construct
  REGION 1..7: note = n-mer motif
AHQTAGP

SEQ ID NO: 4120 - protein, 7 aa, synthetic construct
  REGION 1..7: note = n-mer motif
NSHDLKY

SEQ ID NO: 4121 - protein, 7 aa, synthetic construct
  REGION 1..7: note = n-mer motif
TTMSTGQ

SEQ ID NO: 4122 - protein, 7 aa, synthetic construct
  REGION 1..7: note = n-mer motif
GFGHVPE

SEQ ID NO: 4123 - protein, 7 aa, synthetic construct
  REGION 1..7: note = n-mer motif
ITAASPQ

SEQ ID NO: 4124 - protein, 7 aa, synthetic construct
  REGION 1..7: note = n-mer motif
VKASAGD

SEQ ID NO: 4125 - protein, 7 aa, synthetic construct
  REGION 1..7: note = n-mer motif
SITHSNT

SEQ ID NO: 4126 - protein, 7 aa, synthetic construct
  REGION 1..7: note = n-mer motif
HNNNMLN

SEQ ID NO: 4127 - protein, 7 aa, synthetic construct
  REGION 1..7: note = n-mer motif
PKTLTST

SEQ ID NO: 4128 - protein, 7 aa, synthetic construct
  REGION 1..7: note = n-mer motif
ITGNTVG

SEQ ID NO: 4129 - protein, 7 aa, synthetic construct
  REGION 1..7: note = n-mer motif
LGNHYTP

SEQ ID NO: 4130 - protein, 7 aa, synthetic construct
  REGION 1..7: note = n-mer motif
SFTNTNP

SEQ ID NO: 4131 - protein, 7 aa, synthetic construct
  REGION 1..7: note = n-mer motif
TLDRNQT

SEQ ID NO: 4132 - protein, 7 aa, synthetic construct
  REGION 1..7: note = n-mer motif
ISTQRPH

SEQ ID NO: 4133 - protein, 7 aa, synthetic construct
  REGION 1..7: note = n-mer motif
TFTTLGK

SEQ ID NO: 4134 - protein, 7 aa, synthetic construct
  REGION 1..7: note = n-mer motif
EKPSLVM

SEQ ID NO: 4135 - protein, 7 aa, synthetic construct
  REGION 1..7: note = n-mer motif
HIETNTS

SEQ ID NO: 4136 - protein, 7 aa, synthetic construct
  REGION 1..7: note = n-mer motif
GTKDILI

SEQ ID NO: 4137 - protein, 7 aa, synthetic construct
  REGION 1..7: note = n-mer motif
ATFSHAG

SEQ ID NO: 4138 - protein, 7 aa, synthetic construct
  REGION 1..7: note = n-mer motif
ANGIFQP

SEQ ID NO: 4139 - protein, 7 aa, synthetic construct
  REGION 1..7: note = n-mer motif
LNVNTLN

SEQ ID NO: 4140 - protein, 7 aa, synthetic construct
  REGION 1..7: note = n-mer motif
TSASENW

SEQ ID NO: 4141 - protein, 7 aa, synthetic construct
  REGION 1..7: note = n-mer motif
LLQGATK

SEQ ID NO: 4142 - protein, 7 aa, synthetic construct
  REGION 1..7: note = n-mer motif
ALETTRA

SEQ ID NO: 4143 - protein, 7 aa, synthetic construct
  REGION 1..7: note = n-mer motif
LTGQNEF

SEQ ID NO: 4144 - protein, 7 aa, synthetic construct
  REGION 1..7: note = n-mer motif
ISHDLKN

SEQ ID NO: 4145 - protein, 7 aa, synthetic construct
  REGION 1..7: note = n-mer motif
AQYNNGV

SEQ ID NO: 4146 - protein, 7 aa, synthetic construct
  REGION 1..7: note = n-mer motif
TTSVEKT

SEQ ID NO: 4147 - protein, 7 aa, synthetic construct
  REGION 1..7: note = n-mer motif
GTSAIMP

SEQ ID NO: 4148 - protein, 7 aa, synthetic construct
  REGION 1..7: note = n-mer motif
QLQGTEA

SEQ ID NO: 4149 - protein, 7 aa, synthetic construct
  REGION 1..7: note = n-mer motif
ALKSQEP

SEQ ID NO: 4150 - protein, 7 aa, synthetic construct
  REGION 1..7: note = n-mer motif
SNSSVAV

SEQ ID NO: 4151 - protein, 7 aa, synthetic construct
  REGION 1..7: note = n-mer motif
NHGRAID

SEQ ID NO: 4152 - protein, 7 aa, synthetic construct
  REGION 1..7: note = n-mer motif
DTYNSNT

SEQ ID NO: 4153 - protein, 7 aa, synthetic construct
  REGION 1..7: note = n-mer motif
TFHQAVK

SEQ ID NO: 4154 - protein, 7 aa, synthetic construct
  REGION 1..7: note = n-mer motif
WHTGVFQ

SEQ ID NO: 4155 - protein, 7 aa, synthetic construct
  REGION 1..7: note = n-mer motif
RGDLSTP

SEQ ID NO: 4156 - protein, 7 aa, synthetic construct
  REGION 1..7: note = n-mer motif
MLSQVLT

SEQ ID NO: 4157 - protein, 7 aa, synthetic construct
  REGION 1..7: note = n-mer motif
ENEKRES

SEQ ID NO: 4158 - protein, 7 aa, synthetic construct
  REGION 1..7: note = n-mer motif
ISSYDGN

SEQ ID NO: 4159 - protein, 7 aa, synthetic construct
  REGION 1..7: note = n-mer motif
TRGDMEF

SEQ ID NO: 4160 - protein, 7 aa, synthetic construct
  REGION 1..7: note = n-mer motif
NVQNVPG

SEQ ID NO: 4161 - protein, 7 aa, synthetic construct
  REGION 1..7: note = n-mer motif
SFTNTNP

SEQ ID NO: 4162 - protein, 7 aa, synthetic construct
  REGION 1..7: note = n-mer motif
SNAGYHS

SEQ ID NO: 4163 - protein, 7 aa, synthetic construct
  REGION 1..7: note = n-mer motif
DYKNSAP

SEQ ID NO: 4164 - protein, 7 aa, synthetic construct
  REGION 1..7: note = n-mer motif
VGKNSYE

SEQ ID NO: 4165 - protein, 7 aa, synthetic construct
  REGION 1..7: note = n-mer motif
AYAGVLG

SEQ ID NO: 4166 - protein, 7 aa, synthetic construct
  REGION 1..7: note = n-mer motif
TTSERVN

SEQ ID NO: 4167 - protein, 7 aa, synthetic construct
  REGION 1..7: note = n-mer motif
DTGIKNV

SEQ ID NO: 4168 - protein, 7 aa, synthetic construct
  REGION 1..7: note = n-mer motif
STSSLVP

SEQ ID NO: 4169 - protein, 7 aa, synthetic construct
  REGION 1..7: note = n-mer motif
WSAGERV

SEQ ID NO: 4170 - protein, 7 aa, synthetic construct
  REGION 1..7: note = n-mer motif
SSGSLIT

SEQ ID NO: 4171 - protein, 7 aa, synthetic construct
  REGION 1..7: note = n-mer motif
WISTEMR

SEQ ID NO: 4172 - protein, 7 aa, synthetic construct
  REGION 1..7: note = n-mer motif
FAAGAHG

SEQ ID NO: 4173 - protein, 7 aa, synthetic construct
  REGION 1..7: note = n-mer motif
IGDRDQR

SEQ ID NO: 4174 - protein, 7 aa, synthetic construct
  REGION 1..7: note = n-mer motif
STIGNST

SEQ ID NO: 4175 - protein, 7 aa, synthetic construct
  REGION 1..7: note = n-mer motif
GSGTVGR

SEQ ID NO: 4176 - protein, 7 aa, synthetic construct
  REGION 1..7: note = n-mer motif
HVTAVVD

SEQ ID NO: 4177 - protein, 7 aa, synthetic construct
  REGION 1..7: note = n-mer motif
DKAGVAN

SEQ ID NO: 4178 - protein, 7 aa, synthetic construct
  REGION 1..7: note = n-mer motif
RLTDTMH

SEQ ID NO: 4179 - protein, 7 aa, synthetic construct
  REGION 1..7: note = n-mer motif
LNTLIHK

SEQ ID NO: 4180 - protein, 7 aa, synthetic construct
  REGION 1..7: note = n-mer motif
SYQNPPP

SEQ ID NO: 4181 - protein, 7 aa, synthetic construct
  REGION 1..7: note = n-mer motif
LTGLNAF

SEQ ID NO: 4182 - protein, 7 aa, synthetic construct
  REGION 1..7: note = n-mer motif
SPVLSPS

SEQ ID NO: 4183 - protein, 7 aa, synthetic construct
  REGION 1..7: note = n-mer motif
VQTHIGV

SEQ ID NO: 4184 - protein, 7 aa, synthetic construct
  REGION 1..7: note = n-mer motif
HMSSVAT

SEQ ID NO: 4185 - protein, 7 aa, synthetic construct
  REGION 1..7: note = n-mer motif
GKANDGS

SEQ ID NO: 4186 - protein, 7 aa, synthetic construct
  REGION 1..7: note = n-mer motif
STNDERK

SEQ ID NO: 4187 - protein, 7 aa, synthetic construct
  REGION 1..7: note = n-mer motif
QGGNSRF

SEQ ID NO: 4188 - protein, 7 aa, synthetic construct
  REGION 1..7: note = n-mer motif
PNNEKNP

SEQ ID NO: 4189 - protein, 7 aa, synthetic construct
  REGION 1..7: note = n-mer motif
VAATGGT

SEQ ID NO: 4190 - protein, 7 aa, synthetic construct
  REGION 1..7: note = n-mer motif
AIVDRGS

SEQ ID NO: 4191 - protein, 7 aa, synthetic construct
  REGION 1..7: note = n-mer motif
SQHHTPL

SEQ ID NO: 4192 - protein, 7 aa, synthetic construct
  REGION 1..7: note = n-mer motif
LQSSMNV

SEQ ID NO: 4193 - protein, 7 aa, synthetic construct
  REGION 1..7: note = n-mer motif
RETNPSE

SEQ ID NO: 4194 - protein, 7 aa, synthetic construct
  REGION 1..7: note = n-mer motif
GFGHLPE

SEQ ID NO: 4195 - protein, 7 aa, synthetic construct
  REGION 1..7: note = n-mer motif
RNATVTV

SEQ ID NO: 4196 - protein, 7 aa, synthetic construct
  REGION 1..7: note = n-mer motif
VSNASGL

SEQ ID NO: 4197 - protein, 7 aa, synthetic construct
  REGION 1..7: note = n-mer motif
DRPNNES

SEQ ID NO: 4198 - protein, 7 aa, synthetic construct
  REGION 1..7: note = n-mer motif
QVSLVKL

SEQ ID NO: 4199 - protein, 7 aa, synthetic construct
  REGION 1..7: note = n-mer motif
SNMREEI

SEQ ID NO: 4200 - protein, 7 aa, synthetic construct
  REGION 1..7: note = n-mer motif
DIGRSNS

SEQ ID NO: 4201 - protein, 7 aa, synthetic construct
  REGION 1..7: note = n-mer motif
DHMNLRS

SEQ ID NO: 4202 - protein, 7 aa, synthetic construct
  REGION 1..7: note = n-mer motif
IERSSDR

SEQ ID NO: 4203 - protein, 7 aa, synthetic construct
  REGION 1..7: note = n-mer motif
LSQNFNP

SEQ ID NO: 4204 - protein, 7 aa, synthetic construct
  REGION 1..7: note = n-mer motif
YSMGQQP

SEQ ID NO: 4205 - protein, 7 aa, synthetic construct
  REGION 1..7: note = n-mer motif
YTQGIMN

SEQ ID NO: 4206 - protein, 7 aa, synthetic construct
  REGION 1..7: note = n-mer motif
MLSHGAL

SEQ ID NO: 4207 - protein, 7 aa, synthetic construct
  REGION 1..7: note = n-mer motif
AYNARLP

SEQ ID NO: 4208 - protein, 7 aa, synthetic construct
  REGION 1..7: note = n-mer motif
RHYSDNA

SEQ ID NO: 4209 - protein, 7 aa, synthetic construct
  REGION 1..7: note = n-mer motif
AHTAMTY

SEQ ID NO: 4210 - protein, 7 aa, synthetic construct
  REGION 1..7: note = n-mer motif
LTGSDMK

SEQ ID NO: 4211 - protein, 7 aa, synthetic construct
  REGION 1..7: note = n-mer motif
TLHTKDL

SEQ ID NO: 4212 - protein, 7 aa, synthetic construct
  REGION 1..7: note = n-mer motif
SGQNGTS

SEQ ID NO: 4213 - protein, 7 aa, synthetic construct
  REGION 1..7: note = n-mer motif
RGDVHTN

SEQ ID NO: 4214 - protein, 7 aa, synthetic construct
  REGION 1..7: note = n-mer motif
TGTATLP

SEQ ID NO: 4215 - protein, 7 aa, synthetic construct
  REGION 1..7: note = n-mer motif
LGTLLSQ

SEQ ID NO: 4216 - protein, 7 aa, synthetic construct
  REGION 1..7: note = n-mer motif
VLSSNLY

SEQ ID NO: 4217 - protein, 7 aa, synthetic construct
  REGION 1..7: note = n-mer motif
SLGSDRM

SEQ ID NO: 4218 - protein, 7 aa, synthetic construct
  REGION 1..7: note = n-mer motif
RGDLSTP

SEQ ID NO: 4219 - protein, 7 aa, synthetic construct
  REGION 1..7: note = n-mer motif
RMSESSD

SEQ ID NO: 4220 - protein, 7 aa, synthetic construct
  REGION 1..7: note = n-mer motif
MTEKASI

SEQ ID NO: 4221 - protein, 6 aa, synthetic construct
  REGION 1..6: note = n-mer motif
TEQSYR

SEQ ID NO: 4222 - protein, 7 aa, synthetic construct
  REGION 1..7: note = n-mer motif
VESKSEP

SEQ ID NO: 4223 - protein, 7 aa, synthetic construct
  REGION 1..7: note = n-mer motif
MNLVRDS

SEQ ID NO: 4224 - protein, 7 aa, synthetic construct
  REGION 1..7: note = n-mer motif
QNHSITT

SEQ ID NO: 4225 - protein, 7 aa, synthetic construct
  REGION 1..7: note = n-mer motif
TLDNNHS

SEQ ID NO: 4226 - protein, 7 aa, synthetic construct
  REGION 1..7: note = n-mer motif
TKSFNDL

SEQ ID NO: 4227 - protein, 7 aa, synthetic construct
  REGION 1..7: note = n-mer motif
ATEHSGR

SEQ ID NO: 4228 - protein, 7 aa, synthetic construct
  REGION 1..7: note = n-mer motif
QGTLLSP

SEQ ID NO: 4229 - protein, 7 aa, synthetic construct
  REGION 1..7: note = n-mer motif
TFHQGVK

SEQ ID NO: 4230 - protein, 7 aa, synthetic construct
  REGION 1..7: note = n-mer motif
CQRADCA

SEQ ID NO: 4231 - protein, 7 aa, synthetic construct
  REGION 1..7: note = n-mer motif
RYDGTLN

SEQ ID NO: 4232 - protein, 7 aa, synthetic construct
  REGION 1..7: note = n-mer motif
QGGTNNP

SEQ ID NO: 4233 - protein, 7 aa, synthetic construct
  REGION 1..7: note = n-mer motif
GGNYHTT

SEQ ID NO: 4234 - protein, 7 aa, synthetic construct
  REGION 1..7: note = n-mer motif
LVVQSAQ

SEQ ID NO: 4235 - protein, 7 aa, synthetic construct
  REGION 1..7: note = n-mer motif
YPHESKN

SEQ ID NO: 4236 - protein, 7 aa, synthetic construct
  REGION 1..7: note = n-mer motif
EIVRHTH

SEQ ID NO: 4237 - protein, 7 aa, synthetic construct
  REGION 1..7: note = n-mer motif
DRTNNMS

SEQ ID NO: 4238 - protein, 7 aa, synthetic construct
  REGION 1..7: note = n-mer motif
SVTNGAE

SEQ ID NO: 4239 - protein, 7 aa, synthetic construct
  REGION 1..7: note = n-mer motif
SGQKNSE

SEQ ID NO: 4240 - protein, 7 aa, synthetic construct
  REGION 1..7: note = n-mer motif
EQKKTDH

SEQ ID NO: 4241 - protein, 7 aa, synthetic construct
  REGION 1..7: note = n-mer motif
NINGGGN

SEQ ID NO: 4242 - protein, 7 aa, synthetic construct
  REGION 1..7: note = n-mer motif
KLHTKDL

SEQ ID NO: 4243 - protein, 7 aa, synthetic construct
  REGION 1..7: note = n-mer motif
SFLVAHP

SEQ ID NO: 4244 - protein, 7 aa, synthetic construct
  REGION 1..7: note = n-mer motif
YQQNIEI

SEQ ID NO: 4245 - protein, 7 aa, synthetic construct
  REGION 1..7: note = n-mer motif
RGDLSTT

SEQ ID NO: 4246 - protein, 7 aa, synthetic construct
  REGION 1..7: note = n-mer motif
ANLNLTS

SEQ ID NO: 4247 - protein, 7 aa, synthetic construct
  REGION 1..7: note = n-mer motif
TVQHAAT

SEQ ID NO: 4248 - protein, 7 aa, synthetic construct
  REGION 1..7: note = n-mer motif
TVNLLAA

SEQ ID NO: 4249 - protein, 7 aa, synthetic construct
  REGION 1..7: note = n-mer motif
NQRVEQK

SEQ ID NO: 4250 - protein, 7 aa, synthetic construct
  REGION 1..7: note = n-mer motif
NTYTAAK

SEQ ID NO: 4251 - protein, 7 aa, synthetic construct
  REGION 1..7: note = n-mer motif
IQRDVGH

SEQ ID NO: 4252 - protein, 7 aa, synthetic construct
  REGION 1..7: note = n-mer motif
ISEMTRY

SEQ ID NO: 4253 - protein, 7 aa, synthetic construct
  REGION 1..7: note = n-mer motif
IATNVIY

SEQ ID NO: 4254 - protein, 7 aa, synthetic construct
  REGION 1..7: note = n-mer motif
NGNHSID

SEQ ID NO: 4255 - protein, 7 aa, synthetic construct
  REGION 1..7: note = n-mer motif
TSIGSAK

SEQ ID NO: 4256 - protein, 7 aa, synthetic construct
  REGION 1..7: note = n-mer motif
NVHSVDK

SEQ ID NO: 4257 - protein, 7 aa, synthetic construct
  REGION 1..7: note = n-mer motif
ELSVPKP

SEQ ID NO: 4258 - protein, 7 aa, synthetic construct
  REGION 1..7: note = n-mer motif
FLDKYNY

SEQ ID NO: 4259 - protein, 7 aa, synthetic construct
  REGION 1..7: note = n-mer motif
YIPNNSG

SEQ ID NO: 4260 - protein, 7 aa, synthetic construct
  REGION 1..7: note = n-mer motif
GLGQPQL

SEQ ID NO: 4261 - protein, 7 aa, synthetic construct
  REGION 1..7: note = n-mer motif
EGSQGNH

SEQ ID NO: 4262 - protein, 7 aa, synthetic construct
  REGION 1..7: note = n-mer motif
NIYMASG

SEQ ID NO: 4263 - protein, 7 aa, synthetic construct
  REGION 1..7: note = n-mer motif
NLQTGVQ

SEQ ID NO: 4264 - protein, 7 aa, synthetic construct
  REGION 1..7: note = n-mer motif
TVAPYSS

SEQ ID NO: 4265 - protein, 7 aa, synthetic construct
  REGION 1..7: note = n-mer motif
SNYSDGI

SEQ ID NO: 4266 - protein, 7 aa, synthetic construct
  REGION 1..7: note = n-mer motif
ATYVVGT

SEQ ID NO: 4267 - protein, 7 aa, synthetic construct
  REGION 1..7: note = n-mer motif
SREAGST

SEQ ID NO: 4268 - protein, 7 aa, synthetic construct
  REGION 1..7: note = n-mer motif
AGKTHAD

SEQ ID NO: 4269 - protein, 7 aa, synthetic construct
  REGION 1..7: note = n-mer motif
PLSLHNS

SEQ ID NO: 4270 - protein, 7 aa, synthetic construct
  REGION 1..7: note = n-mer motif
LRDLNGG

SEQ ID NO: 4271 - protein, 7 aa, synthetic construct
  REGION 1..7: note = n-mer motif
DRTYSNT

SEQ ID NO: 4272 - protein, 7 aa, synthetic construct
  REGION 1..7: note = n-mer motif
SVTSGTQ

SEQ ID NO: 4273 - protein, 7 aa, synthetic construct
  REGION 1..7: note = n-mer motif
NMTSAYH

SEQ ID NO: 4274 - protein, 7 aa, synthetic construct
  REGION 1..7: note = n-mer motif
VMGGPGI

SEQ ID NO: 4275 - protein, 7 aa, synthetic construct
  REGION 1..7: note = n-mer motif
AGTHTDK

SEQ ID NO: 4276 - protein, 7 aa, synthetic construct
  REGION 1..7: note = n-mer motif
GTMNIGI

SEQ ID NO: 4277 - protein, 7 aa, synthetic construct
  REGION 1..7: note = n-mer motif
TAGGERA

SEQ ID NO: 4278 - protein, 7 aa, synthetic construct
  REGION 1..7: note = n-mer motif
GMTSNQV

SEQ ID NO: 4279 - protein, 7 aa, synthetic construct
  REGION 1..7: note = n-mer motif
HFSQITN

SEQ ID NO: 4280 - protein, 7 aa, synthetic construct
  REGION 1..7: note = n-mer motif
SRIENNN

SEQ ID NO: 4281 - protein, 7 aa, synthetic construct
  REGION 1..7: note = n-mer motif
DTASYNN

SEQ ID NO: 4282 - protein, 7 aa, synthetic construct
  REGION 1..7: note = n-mer motif
VNQSPGA

SEQ ID NO: 4283 - protein, 7 aa, synthetic construct
  REGION 1..7: note = n-mer motif
NNMGHGH

SEQ ID NO: 4284 - protein, 7 aa, synthetic construct
  REGION 1..7: note = n-mer motif
SRLSQDP

SEQ ID NO: 4285 - protein, 7 aa, synthetic construct
  REGION 1..7: note = n-mer motif
STSQAVQ

SEQ ID NO: 4286 - protein, 7 aa, synthetic construct
  REGION 1..7: note = n-mer motif
RWQGLSA

SEQ ID NO: 4287 - protein, 7 aa, synthetic construct
  REGION 1..7: note = n-mer motif
AHMHSEL

SEQ ID NO: 4288 - protein, 7 aa, synthetic construct
  REGION 1..7: note = n-mer motif
NNLTNST

SEQ ID NO: 4289 - protein, 7 aa, synthetic construct
  REGION 1..7: note = n-mer motif
QPSASEL

SEQ ID NO: 4290 - protein, 7 aa, synthetic construct
  REGION 1..7: note = n-mer motif
GTSLENR

SEQ ID NO: 4291 - protein, 7 aa, synthetic construct
  REGION 1..7: note = n-mer motif
LSNSITP

SEQ ID NO: 4292 - protein, 7 aa, synthetic construct
  REGION 1..7: note = n-mer motif
TIVSTSY

SEQ ID NO: 4293 - protein, 7 aa, synthetic construct
  REGION 1..7: note = n-mer motif
TLGYPDK

SEQ ID NO: 4294 - protein, 7 aa, synthetic construct
  REGION 1..7: note = n-mer motif
SRHDVRN

SEQ ID NO: 4295 - protein, 7 aa, synthetic construct
  REGION 1..7: note = n-mer motif
NGSVANP

SEQ ID NO: 4296 - protein, 7 aa, synthetic construct
  REGION 1..7: note = n-mer motif
AMDGYRV

SEQ ID NO: 4297 - protein, 7 aa, synthetic construct
  REGION 1..7: note = n-mer motif
WTGAQPS

SEQ ID NO: 4298 - protein, 7 aa, synthetic construct
  REGION 1..7: note = n-mer motif
KNGAIGT

SEQ ID NO: 4299 - protein, 7 aa, synthetic construct
  REGION 1..7: note = n-mer motif
VLPSRIA

SEQ ID NO: 4300 - protein, 7 aa, synthetic construct
  REGION 1..7: note = n-mer motif
DNVNSQP

SEQ ID NO: 4301 - protein, 7 aa, synthetic construct
  REGION 1..7: note = n-mer motif
GVNASYS

SEQ ID NO: 4302 - protein, 7 aa, synthetic construct
  REGION 1..7: note = n-mer motif
LSHAMDR

SEQ ID NO: 4303 - protein, 7 aa, synthetic construct
  REGION 1..7: note = n-mer motif
RAHGDNQ

SEQ ID NO: 4304 - protein, 7 aa, synthetic construct
  REGION 1..7: note = n-mer motif
LQTPGTT

SEQ ID NO: 4305 - protein, 7 aa, synthetic construct
  REGION 1..7: note = n-mer motif
TQVVSIY

SEQ ID NO: 4306 - protein, 7 aa, synthetic construct
  REGION 1..7: note = n-mer motif
QVQGTLG

SEQ ID NO: 4307 - protein, 7 aa, synthetic construct
  REGION 1..7: note = n-mer motif
VGNQNLP

SEQ ID NO: 4308 - protein, 7 aa, synthetic construct
  REGION 1..7: note = n-mer motif
YVDYSKS

SEQ ID NO: 4309 - protein, 7 aa, synthetic construct
  REGION 1..7: note = n-mer motif
LLNSSGV

SEQ ID NO: 4310 - protein, 7 aa, synthetic construct
  REGION 1..7: note = n-mer motif
NQSLTMD

SEQ ID NO: 4311 - protein, 7 aa, synthetic construct
  REGION 1..7: note = n-mer motif
AGKDLSN

SEQ ID NO: 4312 - protein, 7 aa, synthetic construct
  REGION 1..7: note = n-mer motif
SYVSVPA

SEQ ID NO: 4313 - protein, 7 aa, synthetic construct
  REGION 1..7: note = n-mer motif
NEGRVQT

SEQ ID NO: 4314 - protein, 7 aa, synthetic construct
  REGION 1..7: note = n-mer motif
TLTQTGM

SEQ ID NO: 4315 - protein, 7 aa, synthetic construct
  REGION 1..7: note = n-mer motif
GFALTGT

SEQ ID NO: 4316 - protein, 7 aa, synthetic construct
  REGION 1..7: note = n-mer motif
QSTLNRP

SEQ ID NO: 4317 - protein, 7 aa, synthetic construct
  REGION 1..7: note = n-mer motif
TTTHSIS

SEQ ID NO: 4318 - protein, 7 aa, synthetic construct
  REGION 1..7: note = n-mer motif
NTHRQEY

SEQ ID NO: 4319 - protein, 7 aa, synthetic construct
  REGION 1..7: note = n-mer motif
SQIVNTT

SEQ ID NO: 4320 - protein, 7 aa, synthetic construct
  REGION 1..7: note = n-mer motif
LVLEMQT

SEQ ID NO: 4321 - protein, 7 aa, synthetic construct
  REGION 1..7: note = n-mer motif
NDISTQR

SEQ ID NO: 4322 - protein, 7 aa, synthetic construct
  REGION 1..7: note = n-mer motif
YTADKKQ

SEQ ID NO: 4323 - protein, 7 aa, synthetic construct
  REGION 1..7: note = n-mer motif
FGATTTA

SEQ ID NO: 4324 - protein, 7 aa, synthetic construct
  REGION 1..7: note = n-mer motif
VQISMNN

SEQ ID NO: 4325 - protein, 7 aa, synthetic construct
  REGION 1..7: note = n-mer motif
MHAQESR

SEQ ID NO: 4326 - protein, 7 aa, synthetic construct
  REGION 1..7: note = n-mer motif
HVNTADR

SEQ ID NO: 4327 - protein, 7 aa, synthetic construct
  REGION 1..7: note = n-mer motif
YSTDSTK

SEQ ID NO: 4328 - protein, 7 aa, synthetic construct
  REGION 1..7: note = n-mer motif
GHDRTPN

SEQ ID NO: 4329 - protein, 7 aa, synthetic construct
  REGION 1..7: note = n-mer motif
TSGVLTR

SEQ ID NO: 4330 - protein, 7 aa, synthetic construct
  REGION 1..7: note = n-mer motif
NIAMSKI

SEQ ID NO: 4331 - protein, 7 aa, synthetic construct
  REGION 1..7: note = n-mer motif
MGTEYRM

SEQ ID NO: 4332 - protein, 7 aa, synthetic construct
  REGION 1..7: note = n-mer motif
PYANRLE

SEQ ID NO: 4333 - protein, 7 aa, synthetic construct
  REGION 1..7: note = n-mer motif
PLQNNKT

SEQ ID NO: 4334 - protein, 7 aa, synthetic construct
  REGION 1..7: note = n-mer motif
SLTEKAP

SEQ ID NO: 4335 - protein, 7 aa, synthetic construct
  REGION 1..7: note = n-mer motif
NMVYTNV

SEQ ID NO: 4336 - protein, 7 aa, synthetic construct
  REGION 1..7: note = n-mer motif
MLSATQG

SEQ ID NO: 4337 - protein, 7 aa, synthetic construct
  REGION 1..7: note = n-mer motif
NMTHSTV

SEQ ID NO: 4338 - protein, 7 aa, synthetic construct
  REGION 1..7: note = n-mer motif
IYTNSHV

SEQ ID NO: 4339 - protein, 7 aa, synthetic construct
  REGION 1..7: note = n-mer motif
WSHDRPT

SEQ ID NO: 4340 - protein, 7 aa, synthetic construct
  REGION 1..7: note = n-mer motif
EKGTPSS

SEQ ID NO: 4341 - protein, 7 aa, synthetic construct
  REGION 1..7: note = n-mer motif
HHSTESL

SEQ ID NO: 4342 - protein, 7 aa, synthetic construct
  REGION 1..7: note = n-mer motif
PKSTQVM

SEQ ID NO: 4343 - protein, 7 aa, synthetic construct
  REGION 1..7: note = n-mer motif
SDRTAQQ

SEQ ID NO: 4344 - protein, 7 aa, synthetic construct
  REGION 1..7: note = n-mer motif
ATLARTS

SEQ ID NO: 4345 - protein, 7 aa, synthetic construct
  REGION 1..7: note = n-mer motif
ISQVSFN

SEQ ID NO: 4346 - protein, 7 aa, synthetic construct
  REGION 1..7: note = n-mer motif
HYGNKDI

SEQ ID NO: 4347 - protein, 7 aa, synthetic construct
  REGION 1..7: note = n-mer motif
NDGTDRR

SEQ ID NO: 4348 - protein, 7 aa, synthetic construct
  REGION 1..7: note = n-mer motif
TNHITGP

SEQ ID NO: 4349 - protein, 7 aa, synthetic construct
  REGION 1..7: note = n-mer motif
TNSNQSS

SEQ ID NO: 4350 - protein, 7 aa, synthetic construct
  REGION 1..7: note = n-mer motif
VATHYNE

SEQ ID NO: 4351 - protein, 7 aa, synthetic construct
  REGION 1..7: note = n-mer motif
DLGTART

SEQ ID NO: 4352 - protein, 7 aa, synthetic construct
  REGION 1..7: note = n-mer motif
ALSQSAG

SEQ ID NO: 4353 - protein, 7 aa, synthetic construct
  REGION 1..7: note = n-mer motif
KTTLHQA

SEQ ID NO: 4354 - protein, 7 aa, synthetic construct
  REGION 1..7: note = n-mer motif
MINAITP

SEQ ID NO: 4355 - protein, 7 aa, synthetic construct
  REGION 1..7: note = n-mer motif
GSTPGAS

SEQ ID NO: 4356 - protein, 7 aa, synthetic construct
  REGION 1..7: note = n-mer motif
NEKPQST

SEQ ID NO: 4357 - protein, 7 aa, synthetic construct
  REGION 1..7: note = n-mer motif
SLMGSAG

SEQ ID NO: 4358 - protein, 7 aa, synthetic construct
  REGION 1..7: note = n-mer motif
TDTLSER

SEQ ID NO: 4359 - protein, 7 aa, synthetic construct
  REGION 1..7: note = n-mer motif
ASQSEKN

SEQ ID NO: 4360 - protein, 7 aa, synthetic construct
  REGION 1..7: note = n-mer motif
AVRTPAM

SEQ ID NO: 4361 - protein, 7 aa, synthetic construct
  REGION 1..7: note = n-mer motif
PNASFGP

SEQ ID NO: 4362 - protein, 7 aa, synthetic construct
  REGION 1..7: note = n-mer motif
KAHVVEI

SEQ ID NO: 4363 - protein, 7 aa, synthetic construct
  REGION 1..7: note = n-mer motif
YISAPPM

SEQ ID NO: 4364 - protein, 7 aa, synthetic construct
  REGION 1..7: note = n-mer motif
PIQNESS

SEQ ID NO: 4365 - protein, 7 aa, synthetic construct
  REGION 1..7: note = n-mer motif
GVTNASK

SEQ ID NO: 4366 - protein, 7 aa, synthetic construct
  REGION 1..7: note = n-mer motif
VNGGKPV

SEQ ID NO: 4367 - protein, 7 aa, synthetic construct
  REGION 1..7: note = n-mer motif
SVLSSST

SEQ ID NO: 4368 - protein, 7 aa, synthetic construct
  REGION 1..7: note = n-mer motif
LAQGTDR

SEQ ID NO: 4369 - protein, 7 aa, synthetic construct
  REGION 1..7: note = n-mer motif
QSVSTGA

SEQ ID NO: 4370 - protein, 7 aa, synthetic construct
  REGION 1..7: note = n-mer motif
LTQVYHE

SEQ ID NO: 4371 - protein, 7 aa, synthetic construct
  REGION 1..7: note = n-mer motif
REMSSLS

SEQ ID NO: 4372 - protein, 7 aa, synthetic construct
  REGION 1..7: note = n-mer motif
TSTMTAR

SEQ ID NO: 4373 - protein, 7 aa, synthetic construct
  REGION 1..7: note = n-mer motif
TIQQVSN

SEQ ID NO: 4374 - protein, 7 aa, synthetic construct
  REGION 1..7: note = n-mer motif
RTQAGDS

SEQ ID NO: 4375 - protein, 7 aa, synthetic construct
  REGION 1..7: note = n-mer motif
NTYTAGK

SEQ ID NO: 4376 - protein, 7 aa, synthetic construct
  REGION 1..7: note = n-mer motif
NEQNTPS

SEQ ID NO: 4377 - protein, 7 aa, synthetic construct
  REGION 1..7: note = n-mer motif
GFAQQEA

SEQ ID NO: 4378 - protein, 7 aa, synthetic construct
  REGION 1..7: note = n-mer motif
SPQHGVI

SEQ ID NO: 4379 - protein, 7 aa, synthetic construct
  REGION 1..7: note = n-mer motif
AVHATSS

SEQ ID NO: 4380 - protein, 7 aa, synthetic construct
  REGION 1..7: note = n-mer motif
GDTRGAH

SEQ ID NO: 4381 - protein, 7 aa, synthetic construct
  REGION 1..7: note = n-mer motif
VRETTHL

SEQ ID NO: 4382 - protein, 7 aa, synthetic construct
  REGION 1..7: note = n-mer motif
LSQQRDY

SEQ ID NO: 4383 - protein, 7 aa, synthetic construct
  REGION 1..7: note = n-mer motif
ATRGESS

SEQ ID NO: 4384 - protein, 7 aa, synthetic construct
  REGION 1..7: note = n-mer motif
TNDSVGS

SEQ ID NO: 4385 - protein, 7 aa, synthetic construct
  REGION 1..7: note = n-mer motif
LTNNFKD

SEQ ID NO: 4386 - protein, 7 aa, synthetic construct
  REGION 1..7: note = n-mer motif
VNGTQIF

SEQ ID NO: 4387 - protein, 7 aa, synthetic construct
  REGION 1..7: note = n-mer motif
GNTGSPG

SEQ ID NO: 4388 - protein, 7 aa, synthetic construct
  REGION 1..7: note = n-mer motif
WTANQGL

SEQ ID NO: 4389 - protein, 7 aa, synthetic construct
  REGION 1..7: note = n-mer motif
NTTPTNH

SEQ ID NO: 4390 - protein, 7 aa, synthetic construct
  REGION 1..7: note = n-mer motif
ERVNGMA

SEQ ID NO: 4391 - protein, 7 aa, synthetic construct
  REGION 1..7: note = n-mer motif
KVTNNAY

SEQ ID NO: 4392 - protein, 7 aa, synthetic construct
  REGION 1..7: note = n-mer motif
LSSESPR

SEQ ID NO: 4393 - protein, 7 aa, synthetic construct
  REGION 1..7: note = n-mer motif
HTAAVAT

SEQ ID NO: 4394 - protein, 7 aa, synthetic construct
  REGION 1..7: note = n-mer motif
YDSRLYA

SEQ ID NO: 4395 - protein, 7 aa, synthetic construct
  REGION 1..7: note = n-mer motif
IEHMLRP

SEQ ID NO: 4396 - protein, 7 aa, synthetic construct
  REGION 1..7: note = n-mer motif
YLESNYT

SEQ ID NO: 4397 - protein, 7 aa, synthetic construct
  REGION 1..7: note = n-mer motif
AYSSTGH

SEQ ID NO: 4398 - protein, 7 aa, synthetic construct
  REGION 1..7: note = n-mer motif
IDISTQS

SEQ ID NO: 4399 - protein, 7 aa, synthetic construct
  REGION 1..7: note = n-mer motif
TTNSGAT

SEQ ID NO: 4400 - protein, 7 aa, synthetic construct
  REGION 1..7: note = n-mer motif
NVLTTVV

SEQ ID NO: 4401 - protein, 7 aa, synthetic construct
  REGION 1..7: note = n-mer motif
TTGIERS

SEQ ID NO: 4402 - protein, 7 aa, synthetic construct
  REGION 1..7: note = n-mer motif
ARVDTNQ

SEQ ID NO: 4403 - protein, 7 aa, synthetic construct
  REGION 1..7: note = n-mer motif
QSVKEAI

SEQ ID NO: 4404 - protein, 7 aa, synthetic construct
  REGION 1..7: note = n-mer motif
ALLSVNE

SEQ ID NO: 4405 - protein, 7 aa, synthetic construct
  REGION 1..7: note = n-mer motif
GRDNHHA

SEQ ID NO: 4406 - protein, 7 aa, synthetic construct
  REGION 1..7: note = n-mer motif
IQSQSQL

SEQ ID NO: 4407 - protein, 7 aa, synthetic construct
  REGION 1..7: note = n-mer motif
SEGSSRS

SEQ ID NO: 4408 - protein, 7 aa, synthetic construct
  REGION 1..7: note = n-mer motif
DVQNIRE

SEQ ID NO: 4409 - protein, 7 aa, synthetic construct
  REGION 1..7: note = n-mer motif
KGHAYEA

SEQ ID NO: 4410 - protein, 7 aa, synthetic construct
  REGION 1..7: note = n-mer motif
YVRAQDQ

SEQ ID NO: 4411 - protein, 7 aa, synthetic construct
  REGION 1..7: note = n-mer motif
VDEYRSR

SEQ ID NO: 4412 - protein, 7 aa, synthetic construct
  REGION 1..7: note = n-mer motif
TLSGYMR

SEQ ID NO: 4413 - protein, 7 aa, synthetic construct
  REGION 1..7: note = n-mer motif
PSVRLPL

SEQ ID NO: 4414 - protein, 7 aa, synthetic construct
  REGION 1..7: note = n-mer motif
NIAGGEQ

SEQ ID NO: 4415 - protein, 7 aa, synthetic construct
  REGION 1..7: note = n-mer motif
LLQSTYL

SEQ ID NO: 4416 - protein, 7 aa, synthetic construct
  REGION 1..7: note = n-mer motif
QSDTTSI

SEQ ID NO: 4417 - protein, 7 aa, synthetic construct
  REGION 1..7: note = n-mer motif
IRSGNAM

SEQ ID NO: 4418 - protein, 7 aa, synthetic construct
  REGION 1..7: note = n-mer motif
MLSQVLT

SEQ ID NO: 4419 - protein, 7 aa, synthetic construct
  REGION 1..7: note = n-mer motif
TERQIEL

SEQ ID NO: 4420 - protein, 7 aa, synthetic construct
  REGION 1..7: note = n-mer motif
GTHASAY

SEQ ID NO: 4421 - protein, 7 aa, synthetic construct
  REGION 1..7: note = n-mer motif
VESSYSR

SEQ ID NO: 4422 - protein, 7 aa, synthetic construct
  REGION 1..7: note = n-mer motif
GGNYHTK

SEQ ID NO: 4423 - protein, 7 aa, synthetic construct
  REGION 1..7: note = n-mer motif
PTSHQEP

SEQ ID NO: 4424 - protein, 7 aa, synthetic construct
  REGION 1..7: note = n-mer motif
TIIGVLP

SEQ ID NO: 4425 - protein, 7 aa, synthetic construct
  REGION 1..7: note = n-mer motif
SNSGSTL

SEQ ID NO: 4426 - protein, 7 aa, synthetic construct
  REGION 1..7: note = n-mer motif
SITTVAN

SEQ ID NO: 4427 - protein, 7 aa, synthetic construct
  REGION 1..7: note = n-mer motif
ASPAQTG

SEQ ID NO: 4428 - protein, 7 aa, synthetic construct
  REGION 1..7: note = n-mer motif
SLPSHSN

SEQ ID NO: 4429 - protein, 7 aa, synthetic construct
  REGION 1..7: note = n-mer motif
LHNAVGP

SEQ ID NO: 4430 - protein, 7 aa, synthetic construct
  REGION 1..7: note = n-mer motif
QAPPTAQ

SEQ ID NO: 4431 - protein, 7 aa, synthetic construct
  REGION 1..7: note = n-mer motif
PNTASNF

SEQ ID NO: 4432 - protein, 7 aa, synthetic construct
  REGION 1..7: note = n-mer motif
PSNSERF

SEQ ID NO: 4433 - protein, 7 aa, synthetic construct
  REGION 1..7: note = n-mer motif
ELHAQQP

SEQ ID NO: 4434 - protein, 7 aa, synthetic construct
  REGION 1..7: note = n-mer motif
GSYSDGS

SEQ ID NO: 4435 - protein, 7 aa, synthetic construct
  REGION 1..7: note = n-mer motif
YGVQANS

SEQ ID NO: 4436 - protein, 7 aa, synthetic construct
  REGION 1..7: note = n-mer motif
EVGKTTH

SEQ ID NO: 4437 - protein, 7 aa, synthetic construct
  REGION 1..7: note = n-mer motif
TSQGRSP

SEQ ID NO: 4438 - protein, 7 aa, synthetic construct
  REGION 1..7: note = n-mer motif
VEHVAHQ

SEQ ID NO: 4439 - protein, 7 aa, synthetic construct
  REGION 1..7: note = n-mer motif
IQSSYNR

SEQ ID NO: 4440 - protein, 7 aa, synthetic construct
  REGION 1..7: note = n-mer motif
TLSVTLG

SEQ ID NO: 4441 - protein, 7 aa, synthetic construct
  REGION 1..7: note = n-mer motif
RNEPVST

SEQ ID NO: 4442 - protein, 7 aa, synthetic construct
  REGION 1..7: note = n-mer motif
VIVGSNE

SEQ ID NO: 4443 - protein, 7 aa, synthetic construct
  REGION 1..7: note = n-mer motif
ELSTPMV

SEQ ID NO: 4444 - protein, 7 aa, synthetic construct
  REGION 1..7: note = n-mer motif
AYNDLRS

SEQ ID NO: 4445 - protein, 7 aa, synthetic construct
  REGION 1..7: note = n-mer motif
NANSGER

SEQ ID NO: 4446 - protein, 7 aa, synthetic construct
  REGION 1..7: note = n-mer motif
LSSQWTQ

SEQ ID NO: 4447 - protein, 7 aa, synthetic construct
  REGION 1..7: note = n-mer motif
INAGNYR

SEQ ID NO: 4448 - protein, 7 aa, synthetic construct
  REGION 1..7: note = n-mer motif
LRSSEAP

SEQ ID NO: 4449 - protein, 7 aa, synthetic construct
  REGION 1..7: note = n-mer motif
TSDTNAR

SEQ ID NO: 4450 - protein, 7 aa, synthetic construct
  REGION 1..7: note = n-mer motif
PNSPHGS

SEQ ID NO: 4451 - protein, 7 aa, synthetic construct
  REGION 1..7: note = n-mer motif
TQHLPST

SEQ ID NO: 4452 - protein, 7 aa, synthetic construct
  REGION 1..7: note = n-mer motif
VHGNAPA

SEQ ID NO: 4453 - protein, 7 aa, synthetic construct
  REGION 1..7: note = n-mer motif
SSQRDSV

SEQ ID NO: 4454 - protein, 7 aa, synthetic construct
  REGION 1..7: note = n-mer motif
PPSVDRK

SEQ ID NO: 4455 - protein, 7 aa, synthetic construct
  REGION 1..7: note = n-mer motif
ETLPYKS

SEQ ID NO: 4456 - protein, 7 aa, synthetic construct
  REGION 1..7: note = n-mer motif
HLSQANH

SEQ ID NO: 4457 - protein, 7 aa, synthetic construct
  REGION 1..7: note = n-mer motif
KPLNGTN

SEQ ID NO: 4458 - protein, 7 aa, synthetic construct
  REGION 1..7: note = n-mer motif
WQTNGMQ

SEQ ID NO: 4459 - protein, 7 aa, synthetic construct
  REGION 1..7: note = n-mer motif
TVNVHSD

SEQ ID NO: 4460 - protein, 7 aa, synthetic construct
  REGION 1..7: note = n-mer motif
TQYVVAP

SEQ ID NO: 4461 - protein, 7 aa, synthetic construct
  REGION 1..7: note = n-mer motif
NVDSSNV

SEQ ID NO: 4462 - protein, 7 aa, synthetic construct
  REGION 1..7: note = n-mer motif
NGYQLQI

SEQ ID NO: 4463 - protein, 7 aa, synthetic construct
  REGION 1..7: note = n-mer motif
EETRTRM

SEQ ID NO: 4464 - protein, 7 aa, synthetic construct
  REGION 1..7: note = n-mer motif
TSPASDR

SEQ ID NO: 4465 - protein, 7 aa, synthetic construct
  REGION 1..7: note = n-mer motif
HSGAGVL

SEQ ID NO: 4466 - protein, 7 aa, synthetic construct
  REGION 1..7: note = n-mer motif
AANPSTE

SEQ ID NO: 4467 - protein, 7 aa, synthetic construct
  REGION 1..7: note = n-mer motif
MLVQNTP

SEQ ID NO: 4468 - protein, 7 aa, synthetic construct
  REGION 1..7: note = n-mer motif
VQQNNIN

SEQ ID NO: 4469 - protein, 7 aa, synthetic construct
  REGION 1..7: note = n-mer motif
HDGYVPN

SEQ ID NO: 4470 - protein, 7 aa, synthetic construct
  REGION 1..7: note = n-mer motif
NSGNNPI

SEQ ID NO: 4471 - protein, 7 aa, synthetic construct
  REGION 1..7: note = n-mer motif
TDNPSYK

SEQ ID NO: 4472 - protein, 7 aa, synthetic construct
  REGION 1..7: note = n-mer motif
GGLSLSS

SEQ ID NO: 4473 - protein, 7 aa, synthetic construct
  REGION 1..7: note = n-mer motif
NNENTRN

SEQ ID NO: 4474 - protein, 7 aa, synthetic construct
  REGION 1..7: note = n-mer motif
KNNNSDS

SEQ ID NO: 4475 - protein, 7 aa, synthetic construct
  REGION 1..7: note = n-mer motif
KDEHLHY

SEQ ID NO: 4476 - protein, 7 aa, synthetic construct
  REGION 1..7: note = n-mer motif
NFTITEA

SEQ ID NO: 4477 - protein, 7 aa, synthetic construct
  REGION 1..7: note = n-mer motif
LNQNSVS

SEQ ID NO: 4478 - protein, 7 aa, synthetic construct
  REGION 1..7: note = n-mer motif
NSHVPNN

SEQ ID NO: 4479 - protein, 7 aa, synthetic construct
  REGION 1..7: note = n-mer motif
NSTHINS

SEQ ID NO: 4480 - protein, 7 aa, synthetic construct
  REGION 1..7: note = n-mer motif
HMSSYSS

SEQ ID NO: 4481 - protein, 7 aa, synthetic construct
  REGION 1..7: note = n-mer motif
NVPNGQG

SEQ ID NO: 4482 - protein, 7 aa, synthetic construct
  REGION 1..7: note = n-mer motif
NGPTGSA

SEQ ID NO: 4483 - protein, 7 aa, synthetic construct
  REGION 1..7: note = n-mer motif
KSNAGFG

SEQ ID NO: 4484 - protein, 7 aa, synthetic construct
  REGION 1..7: note = n-mer motif
AAALETI

SEQ ID NO: 4485 - protein, 7 aa, synthetic construct
  REGION 1..7: note = n-mer motif
NRQRDFE

SEQ ID NO: 4486 - protein, 7 aa, synthetic construct
  REGION 1..7: note = n-mer motif
GSGNEPG

SEQ ID NO: 4487 - protein, 7 aa, synthetic construct
  REGION 1..7: note = n-mer motif
VSVAVPA

SEQ ID NO: 4488 - protein, 7 aa, synthetic construct
  REGION 1..7: note = n-mer motif
HSNTHYE

SEQ ID NO: 4489 - protein, 7 aa, synthetic construct
  REGION 1..7: note = n-mer motif
PDRANDK

SEQ ID NO: 4490 - protein, 7 aa, synthetic construct
  REGION 1..7: note = n-mer motif
QVGALMV

SEQ ID NO: 4491 - protein, 7 aa, synthetic construct
  REGION 1..7: note = n-mer motif
LTPQGTS

SEQ ID NO: 4492 - protein, 7 aa, synthetic construct
  REGION 1..7: note = n-mer motif
LYDGKHV

SEQ ID NO: 4493 - protein, 7 aa, synthetic construct
  REGION 1..7: note = n-mer motif
LTESVRN

SEQ ID NO: 4494 - protein, 7 aa, synthetic construct
  REGION 1..7: note = n-mer motif
STYGNTY

SEQ ID NO: 4495 - protein, 7 aa, synthetic construct
  REGION 1..7: note = n-mer motif
NAISTNN

SEQ ID NO: 4496 - protein, 7 aa, synthetic construct
  REGION 1..7: note = n-mer motif
IAHVSTN

SEQ ID NO: 4497 - protein, 7 aa, synthetic construct
  REGION 1..7: note = n-mer motif
SEERTRA

SEQ ID NO: 4498 - protein, 7 aa, synthetic construct
  REGION 1..7: note = n-mer motif
RWSENNS

SEQ ID NO: 4499 - protein, 7 aa, synthetic construct
  REGION 1..7: note = n-mer motif
DGNNTTY

SEQ ID NO: 4500 - protein, 7 aa, synthetic construct
  REGION 1..7: note = n-mer motif
VTTVDSA

SEQ ID NO: 4501 - protein, 7 aa, synthetic construct
  REGION 1..7: note = n-mer motif
TVKQTSP

SEQ ID NO: 4502 - protein, 7 aa, synthetic construct
  REGION 1..7: note = n-mer motif
SIYLAST

SEQ ID NO: 4503 - protein, 7 aa, synthetic construct
  REGION 1..7: note = n-mer motif
TTRNEHS

SEQ ID NO: 4504 - protein, 7 aa, synthetic construct
  REGION 1..7: note = n-mer motif
SYDMHTN

SEQ ID NO: 4505 - protein, 7 aa, synthetic construct
  REGION 1..7: note = n-mer motif
VSTYLLA

SEQ ID NO: 4506 - protein, 7 aa, synthetic construct
  REGION 1..7: note = n-mer motif
GEQSHNQ

SEQ ID NO: 4507 - protein, 7 aa, synthetic construct
  REGION 1..7: note = n-mer motif
TANNHSP

SEQ ID NO: 4508 - protein, 7 aa, synthetic construct
  REGION 1..7: note = n-mer motif
QFHGTSE

SEQ ID NO: 4509 - protein, 7 aa, synthetic construct
  REGION 1..7: note = n-mer motif
NVLGASS

SEQ ID NO: 4510 - protein, 7 aa, synthetic construct
  REGION 1..7: note = n-mer motif
RDSTISR

SEQ ID NO: 4511 - protein, 7 aa, synthetic construct
  REGION 1..7: note = n-mer motif
VIGTSRD

SEQ ID NO: 4512 - protein, 7 aa, synthetic construct
  REGION 1..7: note = n-mer motif
NYEKEFV

SEQ ID NO: 4513 - protein, 7 aa, synthetic construct
  REGION 1..7: note = n-mer motif
MDQSHSR

SEQ ID NO: 4514 - protein, 7 aa, synthetic construct
  REGION 1..7: note = n-mer motif
NSQNPQG

SEQ ID NO: 4515 - protein, 7 aa, synthetic construct
  REGION 1..7: note = n-mer motif
HTGTDNR

SEQ ID NO: 4516 - protein, 7 aa, synthetic construct
  REGION 1..7: note = n-mer motif
YNTVDQR

SEQ ID NO: 4517 - protein, 7 aa, synthetic construct
  REGION 1..7: note = n-mer motif
KESLEDV

SEQ ID NO: 4518 - protein, 7 aa, synthetic construct
  REGION 1..7: note = n-mer motif
TANSTYV

SEQ ID NO: 4519 - protein, 7 aa, synthetic construct
  REGION 1..7: note = n-mer motif
YLNSTQI

SEQ ID NO: 4520 - protein, 7 aa, synthetic construct
  REGION 1..7: note = n-mer motif
RVEDTNS

SEQ ID NO: 4521 - protein, 7 aa, synthetic construct
  REGION 1..7: note = n-mer motif
NDARNRA

SEQ ID NO: 4522 - protein, 7 aa, synthetic construct
  REGION 1..7: note = n-mer motif
NTNNQEQ

SEQ ID NO: 4523 - protein, 7 aa, synthetic construct
  REGION 1..7: note = n-mer motif
TVGSNSI

SEQ ID NO: 4524 - protein, 7 aa, synthetic construct
  REGION 1..7: note = n-mer motif
YGERART

SEQ ID NO: 4525 - protein, 7 aa, synthetic construct
  REGION 1..7: note = n-mer motif
PTGGSPP

SEQ ID NO: 4526 - protein, 7 aa, synthetic construct
  REGION 1..7: note = n-mer motif
LGQVNST

SEQ ID NO: 4527 - protein, 7 aa, synthetic construct
  REGION 1..7: note = n-mer motif
VSGPVSV

SEQ ID NO: 4528 - protein, 7 aa, synthetic construct
  REGION 1..7: note = n-mer motif
GTNHDFS

SEQ ID NO: 4529 - protein, 7 aa, synthetic construct
  REGION 1..7: note = n-mer motif
KTLDNNA

SEQ ID NO: 4530 - protein, 7 aa, synthetic construct
  REGION 1..7: note = n-mer motif
HSELRQN

SEQ ID NO: 4531 - protein, 7 aa, synthetic construct
  REGION 1..7: note = n-mer motif
EKNLTNA

SEQ ID NO: 4532 - protein, 7 aa, synthetic construct
  REGION 1..7: note = n-mer motif
TGLGGNS

SEQ ID NO: 4533 - protein, 7 aa, synthetic construct
  REGION 1..7: note = n-mer motif
KDHILSL

SEQ ID NO: 4534 - protein, 7 aa, synthetic construct
  REGION 1..7: note = n-mer motif
ITTGGVL

SEQ ID NO: 4535 - protein, 7 aa, synthetic construct
  REGION 1..7: note = n-mer motif
LADSNSK

SEQ ID NO: 4536 - protein, 7 aa, synthetic construct
  REGION 1..7: note = n-mer motif
SISDKNQ

SEQ ID NO: 4537 - protein, 7 aa, synthetic construct
  REGION 1..7: note = n-mer motif
YIAGGEQ

SEQ ID NO: 4538 - protein, 7 aa, synthetic construct
  REGION 1..7: note = n-mer motif
LPDKGRI

SEQ ID NO: 4539 - protein, 7 aa, synthetic construct
  REGION 1..7: note = n-mer motif
LIQTQGT

SEQ ID NO: 4540 - protein, 7 aa, synthetic construct
  REGION 1..7: note = n-mer motif
YSGELNK

SEQ ID NO: 4541 - protein, 7 aa, synthetic construct
  REGION 1..7: note = n-mer motif
CASEVCQ

SEQ ID NO: 4542 - protein, 7 aa, synthetic construct
  REGION 1..7: note = n-mer motif
LMAANTA

SEQ ID NO: 4543 - protein, 7 aa, synthetic construct
  REGION 1..7: note = n-mer motif
HQSFDAG

SEQ ID NO: 4544 - protein, 7 aa, synthetic construct
  REGION 1..7: note = n-mer motif
GETLRSQ

SEQ ID NO: 4545 - protein, 7 aa, synthetic construct
  REGION 1..7: note = n-mer motif
QTDGPNF

SEQ ID NO: 4546 - protein, 7 aa, synthetic construct
  REGION 1..7: note = n-mer motif
TTTNVNF

SEQ ID NO: 4547 - protein, 7 aa, synthetic construct
  REGION 1..7: note = n-mer motif
NMTNENG

SEQ ID NO: 4548 - protein, 7 aa, synthetic construct
  REGION 1..7: note = n-mer motif
GYSPSTP

SEQ ID NO: 4549 - protein, 7 aa, synthetic construct
  REGION 1..7: note = n-mer motif
LQVTVHN

SEQ ID NO: 4550 - protein, 7 aa, synthetic construct
  REGION 1..7: note = n-mer motif
DLTHVHR

SEQ ID NO: 4551 - protein, 7 aa, synthetic construct
  REGION 1..7: note = n-mer motif
TELSEYT

SEQ ID NO: 4552 - protein, 7 aa, synthetic construct
  REGION 1..7: note = n-mer motif
MTVASTS

SEQ ID NO: 4553 - protein, 7 aa, synthetic construct
  REGION 1..7: note = n-mer motif
SSQAHGP

SEQ ID NO: 4554 - protein, 7 aa, synthetic construct
  REGION 1..7: note = n-mer motif
TRSPNED

SEQ ID NO: 4555 - protein, 7 aa, synthetic construct
  REGION 1..7: note = n-mer motif
DNNKHGT

SEQ ID NO: 4556 - protein, 7 aa, synthetic construct
  REGION 1..7: note = n-mer motif
REIVHSN

SEQ ID NO: 4557 - protein, 7 aa, synthetic construct
  REGION 1..7: note = n-mer motif
RKLELDL

SEQ ID NO: 4558 - protein, 7 aa, synthetic construct
  REGION 1..7: note = n-mer motif
IYETVTL

SEQ ID NO: 4559 - protein, 7 aa, synthetic construct
  REGION 1..7: note = n-mer motif
NSGSTSF

SEQ ID NO: 4560 - protein, 7 aa, synthetic construct
  REGION 1..7: note = n-mer motif
PSTNESR

SEQ ID NO: 4561 - protein, 7 aa, synthetic construct
  REGION 1..7: note = n-mer motif
QADLRYK

SEQ ID NO: 4562 - protein, 7 aa, synthetic construct
  REGION 1..7: note = n-mer motif
DQPGYVR

SEQ ID NO: 4563 - protein, 7 aa, synthetic construct
  REGION 1..7: note = n-mer motif
DAMLAHP

SEQ ID NO: 4564 - protein, 7 aa, synthetic construct
  REGION 1..7: note = n-mer motif
TRHDGST

SEQ ID NO: 4565 - protein, 7 aa, synthetic construct
  REGION 1..7: note = n-mer motif
LANMSAP

SEQ ID NO: 4566 - protein, 7 aa, synthetic construct
  REGION 1..7: note = n-mer motif
TGHPPAA

SEQ ID NO: 4567 - protein, 7 aa, synthetic construct
  REGION 1..7: note = n-mer motif
SSISLRY

SEQ ID NO: 4568 - protein, 7 aa, synthetic construct
  REGION 1..7: note = n-mer motif
MHVDKTS

SEQ ID NO: 4569 - protein, 7 aa, synthetic construct
  REGION 1..7: note = n-mer motif
GSDSKHP

SEQ ID NO: 4570 - protein, 7 aa, synthetic construct
  REGION 1..7: note = n-mer motif
GESSSIS

SEQ ID NO: 4571 - protein, 7 aa, synthetic construct
  REGION 1..7: note = n-mer motif
VVHSHSE

SEQ ID NO: 4572 - protein, 7 aa, synthetic construct
  REGION 1..7: note = n-mer motif
SVRAHVL

SEQ ID NO: 4573 - protein, 7 aa, synthetic construct
  REGION 1..7: note = n-mer motif
ADGAKSA

SEQ ID NO: 4574 - protein, 7 aa, synthetic construct
  REGION 1..7: note = n-mer motif
GEARREA

SEQ ID NO: 4575 - protein, 7 aa, synthetic construct
  REGION 1..7: note = n-mer motif
FNATVVH

SEQ ID NO: 4576 - protein, 7 aa, synthetic construct
  REGION 1..7: note = n-mer motif
WTEGGSG

SEQ ID NO: 4577 - protein, 7 aa, synthetic construct
  REGION 1..7: note = n-mer motif
DSSYTHP

SEQ ID NO: 4578 - protein, 7 aa, synthetic construct
  REGION 1..7: note = n-mer motif
FPSRDNV

SEQ ID NO: 4579 - protein, 7 aa, synthetic construct
  REGION 1..7: note = n-mer motif
AITHIGT

SEQ ID NO: 4580 - protein, 7 aa, synthetic construct
  REGION 1..7: note = n-mer motif
AFKSGSI

SEQ ID NO: 4581 - protein, 7 aa, synthetic construct
  REGION 1..7: note = n-mer motif
MSNASYI

SEQ ID NO: 4582 - protein, 7 aa, synthetic construct
  REGION 1..7: note = n-mer motif
AERNDRT

SEQ ID NO: 4583 - protein, 7 aa, synthetic construct
  REGION 1..7: note = n-mer motif
TLETTRS

SEQ ID NO: 4584 - protein, 7 aa, synthetic construct
  REGION 1..7: note = n-mer motif
RLHGSDS

SEQ ID NO: 4585 - protein, 7 aa, synthetic construct
  REGION 1..7: note = n-mer motif
YEGHMNT

SEQ ID NO: 4586 - protein, 7 aa, synthetic construct
  REGION 1..7: note = n-mer motif
SVTTNLM

SEQ ID NO: 4587 - protein, 7 aa, synthetic construct
  REGION 1..7: note = n-mer motif
LRDQTSM

SEQ ID NO: 4588 - protein, 7 aa, synthetic construct
  REGION 1..7: note = n-mer motif
PASHSAG

SEQ ID NO: 4589 - protein, 7 aa, synthetic construct
  REGION 1..7: note = n-mer motif
VVENLRQ

SEQ ID NO: 4590 - protein, 7 aa, synthetic construct
  REGION 1..7: note = n-mer motif
QQSQNSI

SEQ ID NO: 4591 - protein, 7 aa, synthetic construct
  REGION 1..7: note = n-mer motif
LVDTDRN

SEQ ID NO: 4592 - protein, 7 aa, synthetic construct
  REGION 1..7: note = n-mer motif
NEMGNYV

SEQ ID NO: 4593 - protein, 7 aa, synthetic construct
  REGION 1..7: note = n-mer motif
STDPRYS

SEQ ID NO: 4594 - protein, 7 aa, synthetic construct
  REGION 1..7: note = n-mer motif
TNGIYQP

SEQ ID NO: 4595 - protein, 7 aa, synthetic construct
  REGION 1..7: note = n-mer motif
WVNSVGN

SEQ ID NO: 4596 - protein, 7 aa, synthetic construct
  REGION 1..7: note = n-mer motif
GVSNNSS

SEQ ID NO: 4597 - protein, 7 aa, synthetic construct
  REGION 1..7: note = n-mer motif
NVNAQSR

SEQ ID NO: 4598 - protein, 7 aa, synthetic construct
  REGION 1..7: note = n-mer motif
TTPPFSN

SEQ ID NO: 4599 - protein, 7 aa, synthetic construct
  REGION 1..7: note = n-mer motif
TGSSHTN

SEQ ID NO: 4600 - protein, 7 aa, synthetic construct
  REGION 1..7: note = n-mer motif
YVDKSMT

SEQ ID NO: 4601 - protein, 7 aa, synthetic construct
  REGION 1..7: note = n-mer motif
LIKNNML

SEQ ID NO: 4602 - protein, 7 aa, synthetic construct
  REGION 1..7: note = n-mer motif
GGTGLSK

SEQ ID NO: 4603 - protein, 7 aa, synthetic construct
  REGION 1..7: note = n-mer motif
ALHNLMN

SEQ ID NO: 4604 - protein, 7 aa, synthetic construct
  REGION 1..7: note = n-mer motif
VHVTNVL

SEQ ID NO: 4605 - protein, 7 aa, synthetic construct
  REGION 1..7: note = n-mer motif
STTHPSE

SEQ ID NO: 4606 - protein, 7 aa, synthetic construct
  REGION 1..7: note = n-mer motif
SVGSPTH

SEQ ID NO: 4607 - protein, 7 aa, synthetic construct
  REGION 1..7: note = n-mer motif
MSNDLPG

SEQ ID NO: 4608 - protein, 7 aa, synthetic construct
  REGION 1..7: note = n-mer motif
FSSTEAR

SEQ ID NO: 4609 - protein, 7 aa, synthetic construct
  REGION 1..7: note = n-mer motif
AGHQQLA

SEQ ID NO: 4610 - protein, 7 aa, synthetic construct
  REGION 1..7: note = n-mer motif
GTILPNQ

SEQ ID NO: 4611 - protein, 7 aa, synthetic construct
  REGION 1..7: note = n-mer motif
SAVSGSS

SEQ ID NO: 4612 - protein, 7 aa, synthetic construct
  REGION 1..7: note = n-mer motif
EVSRDGL

SEQ ID NO: 4613 - protein, 7 aa, synthetic construct
  REGION 1..7: note = n-mer motif
QSLKDGT

SEQ ID NO: 4614 - protein, 7 aa, synthetic construct
  REGION 1..7: note = n-mer motif
TREGNHA

SEQ ID NO: 4615 - protein, 7 aa, synthetic construct
  REGION 1..7: note = n-mer motif
VATQNLL

SEQ ID NO: 4616 - protein, 7 aa, synthetic construct
  REGION 1..7: note = n-mer motif
AEMTHRL

SEQ ID NO: 4617 - protein, 7 aa, synthetic construct
  REGION 1..7: note = n-mer motif
QRPDPLK

SEQ ID NO: 4618 - protein, 7 aa, synthetic construct
  REGION 1..7: note = n-mer motif
EHISSYG

SEQ ID NO: 4619 - protein, 7 aa, synthetic construct
  REGION 1..7: note = n-mer motif
QKSNDQN

SEQ ID NO: 4620 - protein, 7 aa, synthetic construct
  REGION 1..7: note = n-mer motif
NLVMSGT

SEQ ID NO: 4621 - protein, 7 aa, synthetic construct
  REGION 1..7: note = n-mer motif
GAGQSHV

SEQ ID NO: 4622 - protein, 7 aa, synthetic construct
  REGION 1..7: note = n-mer motif
LNHTMPL

SEQ ID NO: 4623 - protein, 7 aa, synthetic construct
  REGION 1..7: note = n-mer motif
VSQSHDV

SEQ ID NO: 4624 - protein, 7 aa, synthetic construct
  REGION 1..7: note = n-mer motif
ANSATNQ

SEQ ID NO: 4625 - protein, 7 aa, synthetic construct
  REGION 1..7: note = n-mer motif
GTGGNRE

SEQ ID NO: 4626 - protein, 7 aa, synthetic construct
  REGION 1..7: note = n-mer motif
AKSSIIL

SEQ ID NO: 4627 - protein, 7 aa, synthetic construct
  REGION 1..7: note = n-mer motif
GGTALGS

SEQ ID NO: 4628 - protein, 7 aa, synthetic construct
  REGION 1..7: note = n-mer motif
NKVESDP

SEQ ID NO: 4629 - protein, 7 aa, synthetic construct
  REGION 1..7: note = n-mer motif
NSKQPDV

SEQ ID NO: 4630 - protein, 7 aa, synthetic construct
  REGION 1..7: note = n-mer motif
SYADRRL

SEQ ID NO: 4631 - protein, 7 aa, synthetic construct
  REGION 1..7: note = n-mer motif
NVNPNGP

SEQ ID NO: 4632 - protein, 7 aa, synthetic construct
  REGION 1..7: note = n-mer motif
EHNSKTY

SEQ ID NO: 4633 - protein, 7 aa, synthetic construct
  REGION 1..7: note = n-mer motif
TQGSNTT

SEQ ID NO: 4634 - protein, 7 aa, synthetic construct
  REGION 1..7: note = n-mer motif
SNVSAYA

SEQ ID NO: 4635 - protein, 7 aa, synthetic construct
  REGION 1..7: note = n-mer motif
AYSDSAR

SEQ ID NO: 4636 - protein, 7 aa, synthetic construct
  REGION 1..7: note = n-mer motif
GSQYANR

SEQ ID NO: 4637 - protein, 7 aa, synthetic construct
  REGION 1..7: note = n-mer motif
TMSVTLE

SEQ ID NO: 4638 - protein, 7 aa, synthetic construct
  REGION 1..7: note = n-mer motif
QTTILAA

SEQ ID NO: 4639 - protein, 7 aa, synthetic construct
  REGION 1..7: note = n-mer motif
LLQSIVV

SEQ ID NO: 4640 - protein, 7 aa, synthetic construct
  REGION 1..7: note = n-mer motif
VHANATL

SEQ ID NO: 4641 - protein, 7 aa, synthetic construct
  REGION 1..7: note = n-mer motif
NKTNADY

SEQ ID NO: 4642 - protein, 7 aa, synthetic construct
  REGION 1..7: note = n-mer motif
NYDTGAK

SEQ ID NO: 4643 - protein, 7 aa, synthetic construct
  REGION 1..7: note = n-mer motif
VYHNRDV

SEQ ID NO: 4644 - protein, 7 aa, synthetic construct
  REGION 1..7: note = n-mer motif
DSAPRSI

SEQ ID NO: 4645 - protein, 7 aa, synthetic construct
  REGION 1..7: note = n-mer motif
LIANLSN

SEQ ID NO: 4646 - protein, 7 aa, synthetic construct
  REGION 1..7: note = n-mer motif
PQDVRQT

SEQ ID NO: 4647 - protein, 7 aa, synthetic construct
  REGION 1..7: note = n-mer motif
TMTAIAM

SEQ ID NO: 4648 - protein, 7 aa, synthetic construct
  REGION 1..7: note = n-mer motif
TYASTEA

SEQ ID NO: 4649 - protein, 7 aa, synthetic construct
  REGION 1..7: note = n-mer motif
PHANGVT

SEQ ID NO: 4650 - protein, 7 aa, synthetic construct
  REGION 1..7: note = n-mer motif
RADVSWS

SEQ ID NO: 4651 - protein, 7 aa, synthetic construct
  REGION 1..7: note = n-mer motif
LTHMTGT

SEQ ID NO: 4652 - protein, 7 aa, synthetic construct
  REGION 1..7: note = n-mer motif
ANDSAKT

SEQ ID NO: 4653 - protein, 7 aa, synthetic construct
  REGION 1..7: note = n-mer motif
ANSGLHN

SEQ ID NO: 4654 - protein, 7 aa, synthetic construct
  REGION 1..7: note = n-mer motif
NVGTDRD

SEQ ID NO: 4655 - protein, 7 aa, synthetic construct
  REGION 1..7: note = n-mer motif
VGTTSNG

SEQ ID NO: 4656 - protein, 7 aa, synthetic construct
  REGION 1..7: note = n-mer motif
GVLGILV

SEQ ID NO: 4657 - protein, 7 aa, synthetic construct
  REGION 1..7: note = n-mer motif
RINAAID

SEQ ID NO: 4658 - protein, 7 aa, synthetic construct
  REGION 1..7: note = n-mer motif
PDTRPSI

SEQ ID NO: 4659 - protein, 7 aa, synthetic construct
  REGION 1..7: note = n-mer motif
GESRTNM

SEQ ID NO: 4660 - protein, 7 aa, synthetic construct
  REGION 1..7: note = n-mer motif
ILLAQSA

SEQ ID NO: 4661 - protein, 7 aa, synthetic construct
  REGION 1..7: note = n-mer motif
YNRDNGS

SEQ ID NO: 4662 - protein, 7 aa, synthetic construct
  REGION 1..7: note = n-mer motif
WNSPGEA

SEQ ID NO: 4663 - protein, 7 aa, synthetic construct
  REGION 1..7: note = n-mer motif
LLGAHQP

SEQ ID NO: 4664 - protein, 7 aa, synthetic construct
  REGION 1..7: note = n-mer motif
IGKDSVP

SEQ ID NO: 4665 - protein, 7 aa, synthetic construct
  REGION 1..7: note = n-mer motif
TRESLVD

SEQ ID NO: 4666 - protein, 7 aa, synthetic construct
  REGION 1..7: note = n-mer motif
ASNHLQA

SEQ ID NO: 4667 - protein, 7 aa, synthetic construct
  REGION 1..7: note = n-mer motif
NLQTGKA

SEQ ID NO: 4668 - protein, 7 aa, synthetic construct
  REGION 1..7: note = n-mer motif
TVGSSYA

SEQ ID NO: 4669 - protein, 7 aa, synthetic construct
  REGION 1..7: note = n-mer motif
DTNGIKS

SEQ ID NO: 4670 - protein, 7 aa, synthetic construct
  REGION 1..7: note = n-mer motif
SLRMENS

SEQ ID NO: 4671 - protein, 7 aa, synthetic construct
  REGION 1..7: note = n-mer motif
TKGNNLV

SEQ ID NO: 4672 - protein, 7 aa, synthetic construct
  REGION 1..7: note = n-mer motif
HTNQMQP

SEQ ID NO: 4673 - protein, 7 aa, synthetic construct
  REGION 1..7: note = n-mer motif
NGNYDGA

SEQ ID NO: 4674 - protein, 7 aa, synthetic construct
  REGION 1..7: note = n-mer motif
EAHNRGN

SEQ ID NO: 4675 - protein, 7 aa, synthetic construct
  REGION 1..7: note = n-mer motif
GTVNSSA

SEQ ID NO: 4676 - protein, 7 aa, synthetic construct
  REGION 1..7: note = n-mer motif
GPTMNHN

SEQ ID NO: 4677 - protein, 7 aa, synthetic construct
  REGION 1..7: note = n-mer motif
VPNNNTS

SEQ ID NO: 4678 - protein, 7 aa, synthetic construct
  REGION 1..7: note = n-mer motif
VSNKSGS

SEQ ID NO: 4679 - protein, 7 aa, synthetic construct
  REGION 1..7: note = n-mer motif
WGVSNSA

SEQ ID NO: 4680 - protein, 7 aa, synthetic construct
  REGION 1..7: note = n-mer motif
VSNVLYS

SEQ ID NO: 4681 - protein, 7 aa, synthetic construct
  REGION 1..7: note = n-mer motif
AGQNSVG

SEQ ID NO: 4682 - protein, 7 aa, synthetic construct
  REGION 1..7: note = n-mer motif
GTSLENR

SEQ ID NO: 4683 - protein, 7 aa, synthetic construct
  REGION 1..7: note = n-mer motif
QMNIHDK

SEQ ID NO: 4684 - protein, 7 aa, synthetic construct
  REGION 1..7: note = n-mer motif
PQLSGTA

SEQ ID NO: 4685 - protein, 7 aa, synthetic construct
  REGION 1..7: note = n-mer motif
SSTPQDT

SEQ ID NO: 4686 - protein, 7 aa, synthetic construct
  REGION 1..7: note = n-mer motif
VQGQTGW

SEQ ID NO: 4687 - protein, 7 aa, synthetic construct
  REGION 1..7: note = n-mer motif
GLTGDLV

SEQ ID NO: 4688 - protein, 7 aa, synthetic construct
  REGION 1..7: note = n-mer motif
NHPAPSS

SEQ ID NO: 4689 - protein, 7 aa, synthetic construct
  REGION 1..7: note = n-mer motif
KEKTTRE

SEQ ID NO: 4690 - protein, 7 aa, synthetic construct
  REGION 1..7: note = n-mer motif
TTNPQTQ

SEQ ID NO: 4691 - protein, 7 aa, synthetic construct
  REGION 1..7: note = n-mer motif
GGEHARN

SEQ ID NO: 4692 - protein, 7 aa, synthetic construct
  REGION 1..7: note = n-mer motif
TTEAVVA

SEQ ID NO: 4693 - protein, 7 aa, synthetic construct
  REGION 1..7: note = n-mer motif
QNSDLAS

SEQ ID NO: 4694 - protein, 7 aa, synthetic construct
  REGION 1..7: note = n-mer motif
YSTEARV

SEQ ID NO: 4695 - protein, 7 aa, synthetic construct
  REGION 1..7: note = n-mer motif
TGQAGGS

SEQ ID NO: 4696 - protein, 7 aa, synthetic construct
  REGION 1..7: note = n-mer motif
TSSNLYV

SEQ ID NO: 4697 - protein, 7 aa, synthetic construct
  REGION 1..7: note = n-mer motif
TARAIDM

SEQ ID NO: 4698 - protein, 7 aa, synthetic construct
  REGION 1..7: note = n-mer motif
QESNRGV

SEQ ID NO: 4699 - protein, 7 aa, synthetic construct
  REGION 1..7: note = n-mer motif
SIGFSVG

SEQ ID NO: 4700 - protein, 7 aa, synthetic construct
  REGION 1..7: note = n-mer motif
ERSTHNV

SEQ ID NO: 4701 - protein, 7 aa, synthetic construct
  REGION 1..7: note = n-mer motif
ANHDNIV

SEQ ID NO: 4702 - protein, 7 aa, synthetic construct
  REGION 1..7: note = n-mer motif
WAMNNVP

SEQ ID NO: 4703 - protein, 7 aa, synthetic construct
  REGION 1..7: note = n-mer motif
YIAAGEQ

SEQ ID NO: 4704 - protein, 7 aa, synthetic construct
  REGION 1..7: note = n-mer motif
SSNTSGS

SEQ ID NO: 4705 - protein, 7 aa, synthetic construct
  REGION 1..7: note = n-mer motif
MGKHEGL

SEQ ID NO: 4706 - protein, 7 aa, synthetic construct
  REGION 1..7: note = n-mer motif
VLTHLPT

SEQ ID NO: 4707 - protein, 7 aa, synthetic construct
  REGION 1..7: note = n-mer motif
EMGNQYP

SEQ ID NO: 4708 - protein, 7 aa, synthetic construct
  REGION 1..7: note = n-mer motif
SLRPTLP

SEQ ID NO: 4709 - protein, 7 aa, synthetic construct
  REGION 1..7: note = n-mer motif
SANLYKQ

SEQ ID NO: 4710 - protein, 7 aa, synthetic construct
  REGION 1..7: note = n-mer motif
QNDRKPD

SEQ ID NO: 4711 - protein, 7 aa, synthetic construct
  REGION 1..7: note = n-mer motif
IISGITV

SEQ ID NO: 4712 - protein, 7 aa, synthetic construct
  REGION 1..7: note = n-mer motif
PSEMRAV

SEQ ID NO: 4713 - protein, 7 aa, synthetic construct
  REGION 1..7: note = n-mer motif
LVTQTPN

SEQ ID NO: 4714 - protein, 7 aa, synthetic construct
  REGION 1..7: note = n-mer motif
IAQNETY

SEQ ID NO: 4715 - protein, 7 aa, synthetic construct
  REGION 1..7: note = n-mer motif
PYLRNMA

SEQ ID NO: 4716 - protein, 7 aa, synthetic construct
  REGION 1..7: note = n-mer motif
GVNTKIE

SEQ ID NO: 4717 - protein, 7 aa, synthetic construct
  REGION 1..7: note = n-mer motif
YSSEMSE

SEQ ID NO: 4718 - protein, 7 aa, synthetic construct
  REGION 1..7: note = n-mer motif
LENPTPA

SEQ ID NO: 4719 - protein, 7 aa, synthetic construct
  REGION 1..7: note = n-mer motif
GVMSNAT

SEQ ID NO: 4720 - protein, 7 aa, synthetic construct
  REGION 1..7: note = n-mer motif
AHTALAG

SEQ ID NO: 4721 - protein, 7 aa, synthetic construct
  REGION 1..7: note = n-mer motif
PVVRDRS

SEQ ID NO: 4722 - protein, 7 aa, synthetic construct
  REGION 1..7: note = n-mer motif
SAGMVSL

SEQ ID NO: 4723 - protein, 7 aa, synthetic construct
  REGION 1..7: note = n-mer motif
SGVNSER

SEQ ID NO: 4724 - protein, 7 aa, synthetic construct
  REGION 1..7: note = n-mer motif
NGDVTNM

SEQ ID NO: 4725 - protein, 7 aa, synthetic construct
  REGION 1..7: note = n-mer motif
SVVPTDK

SEQ ID NO: 4726 - protein, 7 aa, synthetic construct
  REGION 1..7: note = n-mer motif
SKGDQLN

SEQ ID NO: 4727 - protein, 7 aa, synthetic construct
  REGION 1..7: note = n-mer motif
DGESRLS

SEQ ID NO: 4728 - protein, 7 aa, synthetic construct
  REGION 1..7: note = n-mer motif
GNMNHSI

SEQ ID NO: 4729 - protein, 7 aa, synthetic construct
  REGION 1..7: note = n-mer motif
SGHASQG

SEQ ID NO: 4730 - protein, 7 aa, synthetic construct
  REGION 1..7: note = n-mer motif
GWSNNEL

SEQ ID NO: 4731 - protein, 7 aa, synthetic construct
  REGION 1..7: note = n-mer motif
GVHTHTV

SEQ ID NO: 4732 - protein, 7 aa, synthetic construct
  REGION 1..7: note = n-mer motif
HVTVTLN

SEQ ID NO: 4733 - protein, 7 aa, synthetic construct
  REGION 1..7: note = n-mer motif
TRGNDIS

SEQ ID NO: 4734 - protein, 7 aa, synthetic construct
  REGION 1..7: note = n-mer motif
SKGGDMV

SEQ ID NO: 4735 - protein, 7 aa, synthetic construct
  REGION 1..7: note = n-mer motif
THGDHIQ

SEQ ID NO: 4736 - protein, 7 aa, synthetic construct
  REGION 1..7: note = n-mer motif
TTNSHAI

SEQ ID NO: 4737 - protein, 7 aa, synthetic construct
  REGION 1..7: note = n-mer motif
VRTVLQQ

SEQ ID NO: 4738 - protein, 7 aa, synthetic construct
  REGION 1..7: note = n-mer motif
TVRSPQP

SEQ ID NO: 4739 - protein, 7 aa, synthetic construct
  REGION 1..7: note = n-mer motif
NTYTAGK

SEQ ID NO: 4740 - protein, 7 aa, synthetic construct
  REGION 1..7: note = n-mer motif
ISNPENT

SEQ ID NO: 4741 - protein, 7 aa, synthetic construct
  REGION 1..7: note = n-mer motif
IGSPLAN

SEQ ID NO: 4742 - protein, 7 aa, synthetic construct
  REGION 1..7: note = n-mer motif
YTGTLVV

SEQ ID NO: 4743 - protein, 7 aa, synthetic construct
  REGION 1..7: note = n-mer motif
GRHTLAD

SEQ ID NO: 4744 - protein, 7 aa, synthetic construct
  REGION 1..7: note = n-mer motif
TDGPRLA

SEQ ID NO: 4745 - protein, 7 aa, synthetic construct
  REGION 1..7: note = n-mer motif
GAGNLGT

SEQ ID NO: 4746 - protein, 7 aa, synthetic construct
  REGION 1..7: note = n-mer motif
LMNRNAP

SEQ ID NO: 4747 - protein, 7 aa, synthetic construct
  REGION 1..7: note = n-mer motif
NAMASSR

SEQ ID NO: 4748 - protein, 7 aa, synthetic construct
  REGION 1..7: note = n-mer motif
QHRAQDV

SEQ ID NO: 4749 - protein, 7 aa, synthetic construct
  REGION 1..7: note = n-mer motif
KIESGTI

SEQ ID NO: 4750 - protein, 7 aa, synthetic construct
  REGION 1..7: note = n-mer motif
TNYPEAN

SEQ ID NO: 4751 - protein, 7 aa, synthetic construct
  REGION 1..7: note = n-mer motif
VYHGVAS

SEQ ID NO: 4752 - protein, 7 aa, synthetic construct
  REGION 1..7: note = n-mer motif
SNVHVVN

SEQ ID NO: 4753 - protein, 7 aa, synthetic construct
  REGION 1..7: note = n-mer motif
TYTDGNP

SEQ ID NO: 4754 - protein, 7 aa, synthetic construct
  REGION 1..7: note = n-mer motif
FIANTNP

SEQ ID NO: 4755 - protein, 7 aa, synthetic construct
  REGION 1..7: note = n-mer motif
DAGYGHD

SEQ ID NO: 4756 - protein, 7 aa, synthetic construct
  REGION 1..7: note = n-mer motif
GLSRNDG

SEQ ID NO: 4757 - protein, 7 aa, synthetic construct
  REGION 1..7: note = n-mer motif
MMGATTK

SEQ ID NO: 4758 - protein, 7 aa, synthetic construct
  REGION 1..7: note = n-mer motif
PINVLTT

SEQ ID NO: 4759 - protein, 7 aa, synthetic construct
  REGION 1..7: note = n-mer motif
AVDQSRL

SEQ ID NO: 4760 - protein, 7 aa, synthetic construct
  REGION 1..7: note = n-mer motif
NASTYMD

SEQ ID NO: 4761 - protein, 7 aa, synthetic construct
  REGION 1..7: note = n-mer motif
TQAGLAS

SEQ ID NO: 4762 - protein, 7 aa, synthetic construct
  REGION 1..7: note = n-mer motif
AQFESGR

SEQ ID NO: 4763 - protein, 7 aa, synthetic construct
  REGION 1..7: note = n-mer motif
RNGGTTD

SEQ ID NO: 4764 - protein, 7 aa, synthetic construct
  REGION 1..7: note = n-mer motif
ANTYNVQ

SEQ ID NO: 4765 - protein, 7 aa, synthetic construct
  REGION 1..7: note = n-mer motif
SGVHSER

SEQ ID NO: 4766 - protein, 7 aa, synthetic construct
  REGION 1..7: note = n-mer motif
NTGTTSV

SEQ ID NO: 4767 - protein, 7 aa, synthetic construct
  REGION 1..7: note = n-mer motif
STSNSHM

SEQ ID NO: 4768 - protein, 7 aa, synthetic construct
  REGION 1..7: note = n-mer motif
GEQHNAP

SEQ ID NO: 4769 - protein, 7 aa, synthetic construct
  REGION 1..7: note = n-mer motif
AHHMTTE

SEQ ID NO: 4770 - protein, 7 aa, synthetic construct
  REGION 1..7: note = n-mer motif
LMTGTAS

SEQ ID NO: 4771 - protein, 7 aa, synthetic construct
  REGION 1..7: note = n-mer motif
AAGADSP

SEQ ID NO: 4772 - protein, 7 aa, synthetic construct
  REGION 1..7: note = n-mer motif
VSLSSPP

SEQ ID NO: 4773 - protein, 7 aa, synthetic construct
  REGION 1..7: note = n-mer motif
RVVAGPN

SEQ ID NO: 4774 - protein, 7 aa, synthetic construct
  REGION 1..7: note = n-mer motif
DKTEMLQ

SEQ ID NO: 4775 - protein, 7 aa, synthetic construct
  REGION 1..7: note = n-mer motif
ARDDTIQ

SEQ ID NO: 4776 - protein, 7 aa, synthetic construct
  REGION 1..7: note = n-mer motif
LHLGLSS

SEQ ID NO: 4777 - protein, 7 aa, synthetic construct
  REGION 1..7: note = n-mer motif
LEGQRDV

SEQ ID NO: 4778 - protein, 7 aa, synthetic construct
  REGION 1..7: note = n-mer motif
ASLSAPA

SEQ ID NO: 4779 - protein, 7 aa, synthetic construct
  REGION 1..7: note = n-mer motif
SNPGNHN

SEQ ID NO: 4780 - protein, 7 aa, synthetic construct
  REGION 1..7: note = n-mer motif
GLNSKGT

SEQ ID NO: 4781 - protein, 7 aa, synthetic construct
  REGION 1..7: note = n-mer motif
KTPSASE

SEQ ID NO: 4782 - protein, 7 aa, synthetic construct
  REGION 1..7: note = n-mer motif
VLASTEK

SEQ ID NO: 4783 - protein, 7 aa, synthetic construct
  REGION 1..7: note = n-mer motif
SVLNKPT

SEQ ID NO: 4784 - protein, 7 aa, synthetic construct
  REGION 1..7: note = n-mer motif
PGNGQSP

SEQ ID NO: 4785 - protein, 7 aa, synthetic construct
  REGION 1..7: note = n-mer motif
ILMGART

SEQ ID NO: 4786 - protein, 7 aa, synthetic construct
  REGION 1..7: note = n-mer motif
ALPSHSS

SEQ ID NO: 4787 - protein, 7 aa, synthetic construct
  REGION 1..7: note = n-mer motif
RDQTHPN

SEQ ID NO: 4788 - protein, 7 aa, synthetic construct
  REGION 1..7: note = n-mer motif
SGPIPAV

SEQ ID NO: 4789 - protein, 7 aa, synthetic construct
  REGION 1..7: note = n-mer motif
YVDDNSR

SEQ ID NO: 4790 - protein, 7 aa, synthetic construct
  REGION 1..7: note = n-mer motif
LTRGVAA

SEQ ID NO: 4791 - protein, 7 aa, synthetic construct
  REGION 1..7: note = n-mer motif
SEKEARL

SEQ ID NO: 4792 - protein, 7 aa, synthetic construct
  REGION 1..7: note = n-mer motif
STTPPFK

SEQ ID NO: 4793 - protein, 7 aa, synthetic construct
  REGION 1..7: note = n-mer motif
YSTTMLN

SEQ ID NO: 4794 - protein, 7 aa, synthetic construct
  REGION 1..7: note = n-mer motif
KNGVIND

SEQ ID NO: 4795 - protein, 7 aa, synthetic construct
  REGION 1..7: note = n-mer motif
FGIGHGT

SEQ ID NO: 4796 - protein, 7 aa, synthetic construct
  REGION 1..7: note = n-mer motif
PLHVASP

SEQ ID NO: 4797 - protein, 7 aa, synthetic construct
  REGION 1..7: note = n-mer motif
LGNGSSL

SEQ ID NO: 4798 - protein, 7 aa, synthetic construct
  REGION 1..7: note = n-mer motif
SGNANIV

SEQ ID NO: 4799 - protein, 7 aa, synthetic construct
  REGION 1..7: note = n-mer motif
GINRTSE

SEQ ID NO: 4800 - protein, 7 aa, synthetic construct
  REGION 1..7: note = n-mer motif
SDNRNTA

SEQ ID NO: 4801 - protein, 7 aa, synthetic construct
  REGION 1..7: note = n-mer motif
RLGTVTN

SEQ ID NO: 4802 - protein, 7 aa, synthetic construct
  REGION 1..7: note = n-mer motif
VEHVAHQ

SEQ ID NO: 4803 - protein, 7 aa, synthetic construct
  REGION 1..7: note = n-mer motif
YTKHPVE

SEQ ID NO: 4804 - protein, 7 aa, synthetic construct
  REGION 1..7: note = n-mer motif
SRITVNA

SEQ ID NO: 4805 - protein, 7 aa, synthetic construct
  REGION 1..7: note = n-mer motif
TVSSYVQ

SEQ ID NO: 4806 - protein, 7 aa, synthetic construct
  REGION 1..7: note = n-mer motif
RAEGSSG

SEQ ID NO: 4807 - protein, 7 aa, synthetic construct
  REGION 1..7: note = n-mer motif
AVGRSDD

SEQ ID NO: 4808 - protein, 7 aa, synthetic construct
  REGION 1..7: note = n-mer motif
RIGVGAP

SEQ ID NO: 4809 - protein, 7 aa, synthetic construct
  REGION 1..7: note = n-mer motif
YSNLVLS

SEQ ID NO: 4810 - protein, 7 aa, synthetic construct
  REGION 1..7: note = n-mer motif
STNSEAV

SEQ ID NO: 4811 - protein, 7 aa, synthetic construct
  REGION 1..7: note = n-mer motif
AMSTHMI

SEQ ID NO: 4812 - protein, 7 aa, synthetic construct
  REGION 1..7: note = n-mer motif
RVDISHF

SEQ ID NO: 4813 - protein, 7 aa, synthetic construct
  REGION 1..7: note = n-mer motif
ILTPLDK

SEQ ID NO: 4814 - protein, 7 aa, synthetic construct
  REGION 1..7: note = n-mer motif
VASTTQT

SEQ ID NO: 4815 - protein, 7 aa, synthetic construct
  REGION 1..7: note = n-mer motif
DRSSATL

SEQ ID NO: 4816 - protein, 7 aa, synthetic construct
  REGION 1..7: note = n-mer motif
DHSEQNS

SEQ ID NO: 4817 - protein, 7 aa, synthetic construct
  REGION 1..7: note = n-mer motif
IRSELEV

SEQ ID NO: 4818 - protein, 7 aa, synthetic construct
  REGION 1..7: note = n-mer motif
ANLGDVE

SEQ ID NO: 4819 - protein, 7 aa, synthetic construct
  REGION 1..7: note = n-mer motif
ELKESQK

SEQ ID NO: 4820 - protein, 7 aa, synthetic construct
  REGION 1..7: note = n-mer motif
SYTAGRP

SEQ ID NO: 4821 - protein, 7 aa, synthetic construct
  REGION 1..7: note = n-mer motif
GPAYNQS

SEQ ID NO: 4822 - protein, 7 aa, synthetic construct
  REGION 1..7: note = n-mer motif
HESHYVS

SEQ ID NO: 4823 - protein, 7 aa, synthetic construct
  REGION 1..7: note = n-mer motif
NGKLGTT

SEQ ID NO: 4824 - protein, 7 aa, synthetic construct
  REGION 1..7: note = n-mer motif
LPPASAG

SEQ ID NO: 4825 - protein, 7 aa, synthetic construct
  REGION 1..7: note = n-mer motif
LSYQTGH

SEQ ID NO: 4826 - protein, 7 aa, synthetic construct
  REGION 1..7: note = n-mer motif
DSQITRL

SEQ ID NO: 4827 - protein, 7 aa, synthetic construct
  REGION 1..7: note = n-mer motif
NVYEGHR

SEQ ID NO: 4828 - protein, 7 aa, synthetic construct
  REGION 1..7: note = n-mer motif
LFTAGST

SEQ ID NO: 4829 - protein, 7 aa, synthetic construct
  REGION 1..7: note = n-mer motif
LVNNDGT

SEQ ID NO: 4830 - protein, 7 aa, synthetic construct
  REGION 1..7: note = n-mer motif
AMNVRSD

SEQ ID NO: 4831 - protein, 7 aa, synthetic construct
  REGION 1..7: note = n-mer motif
ASLDRLP

SEQ ID NO: 4832 - protein, 7 aa, synthetic construct
  REGION 1..7: note = n-mer motif
GSRNGPT

SEQ ID NO: 4833 - protein, 7 aa, synthetic construct
  REGION 1..7: note = n-mer motif
MSDGHSK

SEQ ID NO: 4834 - protein, 7 aa, synthetic construct
  REGION 1..7: note = n-mer motif
SNRTEMP

SEQ ID NO: 4835 - protein, 7 aa, synthetic construct
  REGION 1..7: note = n-mer motif
NVVKNNT

SEQ ID NO: 4836 - protein, 7 aa, synthetic construct
  REGION 1..7: note = n-mer motif
VVDSTYP

SEQ ID NO: 4837 - protein, 7 aa, synthetic construct
  REGION 1..7: note = n-mer motif
VAGGTSE

SEQ ID NO: 4838 - protein, 7 aa, synthetic construct
  REGION 1..7: note = n-mer motif
RADMTPL

SEQ ID NO: 4839 - protein, 7 aa, synthetic construct
  REGION 1..7: note = n-mer motif
GHEQTDA

SEQ ID NO: 4840 - protein, 7 aa, synthetic construct
  REGION 1..7: note = n-mer motif
SALISVV

SEQ ID NO: 4841 - protein, 7 aa, synthetic construct
  REGION 1..7: note = n-mer motif
NSTTAQS

SEQ ID NO: 4842 - protein, 7 aa, synthetic construct
  REGION 1..7: note = n-mer motif
YGDLTTV

SEQ ID NO: 4843 - protein, 7 aa, synthetic construct
  REGION 1..7: note = n-mer motif
ARNDGQG

SEQ ID NO: 4844 - protein, 7 aa, synthetic construct
  REGION 1..7: note = n-mer motif
LNVSSSK

SEQ ID NO: 4845 - protein, 7 aa, synthetic construct
  REGION 1..7: note = n-mer motif
SGVSKER

SEQ ID NO: 4846 - protein, 7 aa, synthetic construct
  REGION 1..7: note = n-mer motif
NMEHTMA

SEQ ID NO: 4847 - protein, 7 aa, synthetic construct
  REGION 1..7: note = n-mer motif
ARPASSD

SEQ ID NO: 4848 - protein, 7 aa, synthetic construct
  REGION 1..7: note = n-mer motif
LREESAR

SEQ ID NO: 4849 - protein, 7 aa, synthetic construct
  REGION 1..7: note = n-mer motif
LANMSAP

SEQ ID NO: 4850 - protein, 7 aa, synthetic construct
  REGION 1..7: note = n-mer motif
NHTVEGR

SEQ ID NO: 4851 - protein, 7 aa, synthetic construct
  REGION 1..7: note = n-mer motif
PQHQHEH

SEQ ID NO: 4852 - protein, 7 aa, synthetic construct
  REGION 1..7: note = n-mer motif
NSSELKT

SEQ ID NO: 4853 - protein, 7 aa, synthetic construct
  REGION 1..7: note = n-mer motif
LVAERLP

SEQ ID NO: 4854 - protein, 7 aa, synthetic construct
  REGION 1..7: note = n-mer motif
NVMHSSS

SEQ ID NO: 4855 - protein, 7 aa, synthetic construct
  REGION 1..7: note = n-mer motif
ASDKGAN

SEQ ID NO: 4856 - protein, 7 aa, synthetic construct
  REGION 1..7: note = n-mer motif
SLDRKPP

SEQ ID NO: 4857 - protein, 7 aa, synthetic construct
  REGION 1..7: note = n-mer motif
TEHEKST

SEQ ID NO: 4858 - protein, 7 aa, synthetic construct
  REGION 1..7: note = n-mer motif
PHNQEMG

SEQ ID NO: 4859 - protein, 7 aa, synthetic construct
  REGION 1..7: note = n-mer motif
ESKTVVI

SEQ ID NO: 4860 - protein, 7 aa, synthetic construct
  REGION 1..7: note = n-mer motif
STGQNLK

SEQ ID NO: 4861 - protein, 7 aa, synthetic construct
  REGION 1..7: note = n-mer motif
VLHVSDV

SEQ ID NO: 4862 - protein, 7 aa, synthetic construct
  REGION 1..7: note = n-mer motif
PDAARSP

SEQ ID NO: 4863 - protein, 7 aa, synthetic construct
  REGION 1..7: note = n-mer motif
APRHAHP

SEQ ID NO: 4864 - protein, 7 aa, synthetic construct
  REGION 1..7: note = n-mer motif
HVNPTPA

SEQ ID NO: 4865 - protein, 7 aa, synthetic construct
  REGION 1..7: note = n-mer motif
LPNERPG

SEQ ID NO: 4866 - protein, 7 aa, synthetic construct
  REGION 1..7: note = n-mer motif
EAKGFGH

SEQ ID NO: 4867 - protein, 7 aa, synthetic construct
  REGION 1..7: note = n-mer motif
SENTSVP

SEQ ID NO: 4868 - protein, 7 aa, synthetic construct
  REGION 1..7: note = n-mer motif
GPGENYR

SEQ ID NO: 4869 - protein, 7 aa, synthetic construct
  REGION 1..7: note = n-mer motif
SHEMNNG

SEQ ID NO: 4870 - protein, 7 aa, synthetic construct
  REGION 1..7: note = n-mer motif
VDTYSGL

SEQ ID NO: 4871 - protein, 7 aa, synthetic construct
  REGION 1..7: note = n-mer motif
GVLGNMV

SEQ ID NO: 4872 - protein, 7 aa, synthetic construct
  REGION 1..7: note = n-mer motif
ALDNSSR

SEQ ID NO: 4873 - protein, 7 aa, synthetic construct
  REGION 1..7: note = n-mer motif
FLGSSNH

SEQ ID NO: 4874 - protein, 7 aa, synthetic construct
  REGION 1..7: note = n-mer motif
PVVHGEP

SEQ ID NO: 4875 - protein, 7 aa, synthetic construct
  REGION 1..7: note = n-mer motif
RREGILM

SEQ ID NO: 4876 - protein, 7 aa, synthetic construct
  REGION 1..7: note = n-mer motif
QQGAPTS

SEQ ID NO: 4877 - protein, 7 aa, synthetic construct
  REGION 1..7: note = n-mer motif
KVSGGET

SEQ ID NO: 4878 - protein, 7 aa, synthetic construct
  REGION 1..7: note = n-mer motif
AKHESSS

SEQ ID NO: 4879 - protein, 7 aa, synthetic construct
  REGION 1..7: note = n-mer motif
ILMGART

SEQ ID NO: 4880 - protein, 7 aa, synthetic construct
  REGION 1..7: note = n-mer motif
TLGSSST

SEQ ID NO: 4881 - protein, 7 aa, synthetic construct
  REGION 1..7: note = n-mer motif
LRSEPTQ

SEQ ID NO: 4882 - protein, 7 aa, synthetic construct
  REGION 1..7: note = n-mer motif
RSEQKTP

SEQ ID NO: 4883 - protein, 7 aa, synthetic construct
  REGION 1..7: note = n-mer motif
HAPSGAI

SEQ ID NO: 4884 - protein, 7 aa, synthetic construct
  REGION 1..7: note = n-mer motif
SSVTSRE

SEQ ID NO: 4885 - protein, 7 aa, synthetic construct
  REGION 1..7: note = n-mer motif
VNPHPAQ

SEQ ID NO: 4886 - protein, 7 aa, synthetic construct
  REGION 1..7: note = n-mer motif
QYSMDTR

SEQ ID NO: 4887 - protein, 7 aa, synthetic construct
  REGION 1..7: note = n-mer motif
TPGVTRT

SEQ ID NO: 4888 - protein, 7 aa, synthetic construct
  REGION 1..7: note = n-mer motif
LYEVGTP

SEQ ID NO: 4889 - protein, 7 aa, synthetic construct
  REGION 1..7: note = n-mer motif
TMTSELS

SEQ ID NO: 4890 - protein, 7 aa, synthetic construct
  REGION 1..7: note = n-mer motif
SGSEYRT

SEQ ID NO: 4891 - protein, 7 aa, synthetic construct
  REGION 1..7: note = n-mer motif
EMQTKNA

SEQ ID NO: 4892 - protein, 7 aa, synthetic construct
  REGION 1..7: note = n-mer motif
GHENMGV

SEQ ID NO: 4893 - protein, 7 aa, synthetic construct
  REGION 1..7: note = n-mer motif
GAHTSAS

SEQ ID NO: 4894 - protein, 7 aa, synthetic construct
  REGION 1..7: note = n-mer motif
ADTLLRR

SEQ ID NO: 4895 - protein, 7 aa, synthetic construct
  REGION 1..7: note = n-mer motif
DNSNNVP

SEQ ID NO: 4896 - protein, 7 aa, synthetic construct
  REGION 1..7: note = n-mer motif
MTANLVE

SEQ ID NO: 4897 - protein, 7 aa, synthetic construct
  REGION 1..7: note = n-mer motif
EAGRTLQ

SEQ ID NO: 4898 - protein, 7 aa, synthetic construct
  REGION 1..7: note = n-mer motif
RHVVPDS

SEQ ID NO: 4899 - protein, 7 aa, synthetic construct
  REGION 1..7: note = n-mer motif
VSSEQYR

SEQ ID NO: 4900 - protein, 7 aa, synthetic construct
  REGION 1..7: note = n-mer motif
GIEASRG

SEQ ID NO: 4901 - protein, 7 aa, synthetic construct
  REGION 1..7: note = n-mer motif
RQGVNGV

SEQ ID NO: 4902 - protein, 7 aa, synthetic construct
  REGION 1..7: note = n-mer motif
TVMMSTR

SEQ ID NO: 4903 - protein, 7 aa, synthetic construct
  REGION 1..7: note = n-mer motif
WQDHNKV

SEQ ID NO: 4904 - protein, 7 aa, synthetic construct
  REGION 1..7: note = n-mer motif
GITGSTG

SEQ ID NO: 4905 - protein, 7 aa, synthetic construct
  REGION 1..7: note = n-mer motif
NYAQRDG

SEQ ID NO: 4906 - protein, 7 aa, synthetic construct
  REGION 1..7: note = n-mer motif
KQEALSS

SEQ ID NO: 4907 - protein, 7 aa, synthetic construct
  REGION 1..7: note = n-mer motif
STLDRSE

SEQ ID NO: 4908 - protein, 7 aa, synthetic construct
  REGION 1..7: note = n-mer motif
AITNTQQ

SEQ ID NO: 4909 - protein, 7 aa, synthetic construct
  REGION 1..7: note = n-mer motif
RLATQSA

SEQ ID NO: 4910 - protein, 7 aa, synthetic construct
  REGION 1..7: note = n-mer motif
WQLTTSH

SEQ ID NO: 4911 - protein, 7 aa, synthetic construct
  REGION 1..7: note = n-mer motif
GGSGSNT

SEQ ID NO: 4912 - protein, 7 aa, synthetic construct
  REGION 1..7: note = n-mer motif
NLVAYTK

SEQ ID NO: 4913 - protein, 7 aa, synthetic construct
  REGION 1..7: note = n-mer motif
KASHDTS

SEQ ID NO: 4914 - protein, 7 aa, synthetic construct
  REGION 1..7: note = n-mer motif
AITIIGT

SEQ ID NO: 4915 - protein, 7 aa, synthetic construct
  REGION 1..7: note = n-mer motif
NASSDRF

SEQ ID NO: 4916 - protein, 7 aa, synthetic construct
  REGION 1..7: note = n-mer motif
ETQRIEL

SEQ ID NO: 4917 - protein, 7 aa, synthetic construct
  REGION 1..7: note = n-mer motif
VIEVNSR

SEQ ID NO: 4918 - protein, 7 aa, synthetic construct
  REGION 1..7: note = n-mer motif
DRDMEGV

SEQ ID NO: 4919 - protein, 7 aa, synthetic construct
  REGION 1..7: note = n-mer motif
ISEMTRY

SEQ ID NO: 4920 - protein, 7 aa, synthetic construct
  REGION 1..7: note = n-mer motif
EHDVSTR

SEQ ID NO: 4921 - protein, 7 aa, synthetic construct
  REGION 1..7: note = n-mer motif
RMEETAY

SEQ ID NO: 4922 - protein, 7 aa, synthetic construct
  REGION 1..7: note = n-mer motif
YSTDLRM

SEQ ID NO: 4923 - protein, 7 aa, synthetic construct
  REGION 1..7: note = n-mer motif
VPEPKKA

SEQ ID NO: 4924 - protein, 7 aa, synthetic construct
  REGION 1..7: note = n-mer motif
TYAPRSP

SEQ ID NO: 4925 - protein, 7 aa, synthetic construct
  REGION 1..7: note = n-mer motif
AAASPLA

SEQ ID NO: 4926 - protein, 7 aa, synthetic construct
  REGION 1..7: note = n-mer motif
SGTYASR

SEQ ID NO: 4927 - protein, 7 aa, synthetic construct
  REGION 1..7: note = n-mer motif
TEASIAA

SEQ ID NO: 4928 - protein, 7 aa, synthetic construct
  REGION 1..7: note = n-mer motif
RIVDTLG

SEQ ID NO: 4929 - protein, 7 aa, synthetic construct
  REGION 1..7: note = n-mer motif
YLQEKFP

SEQ ID NO: 4930 - protein, 7 aa, synthetic construct
  REGION 1..7: note = n-mer motif
VHDQGAG

SEQ ID NO: 4931 - protein, 7 aa, synthetic construct
  REGION 1..7: note = n-mer motif
PQATLNN

SEQ ID NO: 4932 - protein, 7 aa, synthetic construct
  REGION 1..7: note = n-mer motif
CGMSECS

SEQ ID NO: 4933 - protein, 7 aa, synthetic construct
  REGION 1..7: note = n-mer motif
GSHNGPT

SEQ ID NO: 4934 - protein, 7 aa, synthetic construct
  REGION 1..7: note = n-mer motif
FGSGPNL

SEQ ID NO: 4935 - protein, 7 aa, synthetic construct
  REGION 1..7: note = n-mer motif
MDTNTHR

SEQ ID NO: 4936 - protein, 7 aa, synthetic construct
  REGION 1..7: note = n-mer motif
KNNPEDG

SEQ ID NO: 4937 - protein, 7 aa, synthetic construct
  REGION 1..7: note = n-mer motif
LPTATGQ

SEQ ID NO: 4938 - protein, 7 aa, synthetic construct
  REGION 1..7: note = n-mer motif
TAERTEY

SEQ ID NO: 4939 - protein, 7 aa, synthetic construct
  REGION 1..7: note = n-mer motif
NYRDITM

SEQ ID NO: 4940 - protein, 7 aa, synthetic construct
  REGION 1..7: note = n-mer motif
PARSDAL

SEQ ID NO: 4941 - protein, 7 aa, synthetic construct
  REGION 1..7: note = n-mer motif
SVVTLGV

SEQ ID NO: 4942 - protein, 7 aa, synthetic construct
  REGION 1..7: note = n-mer motif
VVKEIKL

SEQ ID NO: 4943 - protein, 7 aa, synthetic construct
  REGION 1..7: note = n-mer motif
DHSKQNS

SEQ ID NO: 4944 - protein, 7 aa, synthetic construct
  REGION 1..7: note = n-mer motif
QSNLVIN

SEQ ID NO: 4945 - protein, 7 aa, synthetic construct
  REGION 1..7: note = n-mer motif
IPVGAMA

SEQ ID NO: 4946 - protein, 7 aa, synthetic construct
  REGION 1..7: note = n-mer motif
TSEMRTA

SEQ ID NO: 4947 - protein, 7 aa, synthetic construct
  REGION 1..7: note = n-mer motif
GSQRAMN

SEQ ID NO: 4948 - protein, 7 aa, synthetic construct
  REGION 1..7: note = n-mer motif
HLSQANH

SEQ ID NO: 4949 - protein, 7 aa, synthetic construct
  REGION 1..7: note = n-mer motif
GGNSHGV

SEQ ID NO: 4950 - protein, 7 aa, synthetic construct
  REGION 1..7: note = n-mer motif
VTRSTKE

SEQ ID NO: 4951 - protein, 7 aa, synthetic construct
  REGION 1..7: note = n-mer motif
MLRASTA

SEQ ID NO: 4952 - protein, 7 aa, synthetic construct
  REGION 1..7: note = n-mer motif
GRQIPEQ

SEQ ID NO: 4953 - protein, 7 aa, synthetic construct
  REGION 1..7: note = n-mer motif
WNQNVSH

SEQ ID NO: 4954 - protein, 7 aa, synthetic construct
  REGION 1..7: note = n-mer motif
QRGELPA

SEQ ID NO: 4955 - protein, 7 aa, synthetic construct
  REGION 1..7: note = n-mer motif
ANDSLRS

SEQ ID NO: 4956 - protein, 7 aa, synthetic construct
  REGION 1..7: note = n-mer motif
NMPPESH

SEQ ID NO: 4957 - protein, 7 aa, synthetic construct
  REGION 1..7: note = n-mer motif
NLSLQSL

SEQ ID NO: 4958 - protein, 7 aa, synthetic construct
  REGION 1..7: note = n-mer motif
TSDGLLS

SEQ ID NO: 4959 - protein, 7 aa, synthetic construct
  REGION 1..7: note = n-mer motif
AGQAYQS

SEQ ID NO: 4960 - protein, 7 aa, synthetic construct
  REGION 1..7: note = n-mer motif
LSVKEEI

SEQ ID NO: 4961 - protein, 7 aa, synthetic construct
  REGION 1..7: note = n-mer motif
DNSPANH

SEQ ID NO: 4962 - protein, 7 aa, synthetic construct
  REGION 1..7: note = n-mer motif
MHNLPSY

SEQ ID NO: 4963 - protein, 7 aa, synthetic construct
  REGION 1..7: note = n-mer motif
YQASNNS

SEQ ID NO: 4964 - protein, 7 aa, synthetic construct
  REGION 1..7: note = n-mer motif
ARAEGVF

SEQ ID NO: 4965 - protein, 7 aa, synthetic construct
  REGION 1..7: note = n-mer motif
GREGNLP

SEQ ID NO: 4966 - protein, 7 aa, synthetic construct
  REGION 1..7: note = n-mer motif
QAAERDR

SEQ ID NO: 4967 - protein, 7 aa, synthetic construct
  REGION 1..7: note = n-mer motif
VENNRMS

SEQ ID NO: 4968 - protein, 7 aa, synthetic construct
  REGION 1..7: note = n-mer motif
NMSHSTL

SEQ ID NO: 4969 - protein, 7 aa, synthetic construct
  REGION 1..7: note = n-mer motif
SSLGLAP

SEQ ID NO: 4970 - protein, 7 aa, synthetic construct
  REGION 1..7: note = n-mer motif
NVAPYSS

SEQ ID NO: 4971 - protein, 7 aa, synthetic construct
  REGION 1..7: note = n-mer motif
RPAQLPE

SEQ ID NO: 4972 - protein, 7 aa, synthetic construct
  REGION 1..7: note = n-mer motif
MSGSGNA

SEQ ID NO: 4973 - protein, 7 aa, synthetic construct
  REGION 1..7: note = n-mer motif
HGGEHRN

SEQ ID NO: 4974 - protein, 7 aa, synthetic construct
  REGION 1..7: note = n-mer motif
ASGARYV

SEQ ID NO: 4975 - protein, 7 aa, synthetic construct
  REGION 1..7: note = n-mer motif
QNHASGE

SEQ ID NO: 4976 - protein, 7 aa, synthetic construct
  REGION 1..7: note = n-mer motif
AHQKDLR

SEQ ID NO: 4977 - protein, 7 aa, synthetic construct
  REGION 1..7: note = n-mer motif
FGKVGTA

SEQ ID NO: 4978 - protein, 7 aa, synthetic construct
  REGION 1..7: note = n-mer motif
LQKSTLA

SEQ ID NO: 4979 - protein, 7 aa, synthetic construct
  REGION 1..7: note = n-mer motif
IHNESYG

SEQ ID NO: 4980 - DNA, 21 bp, synthetic construct
  source 1..21: mol_type = other DNA
  misc_feature 1..21: note = n-mer motif encoding polynucleotide
aggggtgatctttctacgcct

SEQ ID NO: 4981 - DNA, 21 bp, synthetic construct
  misc_feature 1..21: note = n-mer motif encoding polynucleotide
  source 1..21: mol_type = other DNA
agaggcgacttatccacaccc

SEQ ID NO: 4982 - DNA, 21 bp, synthetic construct
  source 1..21: mol_type = other DNA
  misc_feature 1..21: note = n-mer motif encoding polynucleotide
agaggagacttgacaacccca

SEQ ID NO: 4983 - DNA, 21 bp, synthetic construct
  source 1..21: mol_type = other DNA
  misc_feature 1..21: note = n-mer motif encoding polynucleotide
aggggcgacctgaaccaatac

SEQ ID NO: 4984 - DNA, 21 bp, synthetic construct
  source 1..21: mol_type = other DNA
  misc_feature 1..21: note = n-mer motif encoding polynucleotide
cggggtgatcagctttatcat

SEQ ID NO: 4985 - DNA, 21 bp, synthetic construct
  misc_feature 1..21: note = n-mer motif encoding polynucleotide
  source 1..21: mol_type = other DNA
aggggggatgcgacggagctt

SEQ ID NO: 4986 - DNA, 21 bp, synthetic construct
  source 1..21: mol_type = other DNA
  misc_feature 1..21: note = n-mer motif encoding polynucleotide
cgaggagacaccatgagcaaa

SEQ ID NO: 4987 - DNA, 21 bp, synthetic construct
  source 1..21: mol_type = other DNA
  misc_feature 1..21: note = n-mer motif encoding polynucleotide
cggggtgatcttaatcagtat

SEQ ID NO: 4988 - DNA, 21 bp, synthetic construct
  source 1..21: mol_type = other DNA
  misc_feature 1..21: note = n-mer motif encoding polynucleotide
cggggtgatcttactacgcct

SEQ ID NO: 4989 - DNA, 21 bp, synthetic construct
  misc_feature 1..21: note = n-mer motif encoding polynucleotide
  source 1..21: mol_type = other DNA
cgcggcgacatgataaacacc

SEQ ID NO: 4990 - DNA, 21 bp, synthetic construct
  source 1..21: mol_type = other DNA
  misc_feature 1..21: note = n-mer motif encoding polynucleotide
cggggggatactatgtctaag

SEQ ID NO: 4991 - DNA, 21 bp, synthetic construct
  source 1..21: mol_type = other DNA
  misc_feature 1..21: note = n-mer motif encoding polynucleotide
cgaggcgacacaatgaactac

SEQ ID NO: 4992 - DNA, 21 bp, synthetic construct
  misc_feature 1..21: note = n-mer motif encoding polynucleotide
  source 1..21: mol_type = other DNA
cggggtgacgcaacagaattg

SEQ ID NO: 4993 - DNA, 21 bp, synthetic construct
  misc_feature 1..21: note = n-mer motif encoding polynucleotide
  source 1..21: mol_type = other DNA
cgtttggacctgcaagtccac

SEQ ID NO: 4994 - DNA, 21 bp, synthetic construct
  source 1..21: mol_type = other DNA
  misc_feature 1..21: note = n-mer motif encoding polynucleotide
cgtggtgatgtggcggctaag

SEQ ID NO: 4995 - DNA, 21 bp, synthetic construct
  misc_feature 1..21: note = n-mer motif encoding polynucleotide
  source 1..21: mol_type = other DNA
aggggcgacctcaacgacagc

SEQ ID NO: 4996 - DNA, 21 bp, synthetic construct
  source 1..21: mol_type = other DNA
  misc_feature 1..21: note = n-mer motif encoding polynucleotide
cgtggggatttgaatgattct

SEQ ID NO: 4997 - DNA, 21 bp, synthetic construct
  misc_feature 1..21: note = n-mer motif encoding polynucleotide
  source 1..21: mol_type = other DNA
tcttatggtaatactcatgat

SEQ ID NO: 4998 - DNA, 21 bp, synthetic construct
  source 1..21: mol_type = other DNA
  misc_feature 1..21: note = n-mer motif encoding polynucleotide
cgtttggacctgcaagtcaac

SEQ ID NO: 4999 - DNA, 21 bp, synthetic construct
  misc_feature 1..21: note = n-mer motif encoding polynucleotide
  source 1..21: mol_type = other DNA
aaagcgggacaactagtggaa

SEQ ID NO: 5000 - DNA, 21 bp, synthetic construct
  misc_feature 1..21: note = n-mer motif encoding polynucleotide
  source 1..21: mol_type = other DNA
gatcagacggctagtattgtt

SEQ ID NO: 5001 - DNA, 21 bp, synthetic construct
  misc_feature 1..21: note = n-mer motif encoding polynucleotide
  source 1..21: mol_type = other DNA
tatattgctgcgggtgagcag

SEQ ID NO: 5002 - DNA, 21 bp, synthetic construct
  source 1..21: mol_type = other DNA
  misc_feature 1..21: note = n-mer motif encoding polynucleotide
gcggttgttctgaatagtaat

SEQ ID NO: 5003 - DNA, 21 bp, synthetic construct
  misc_feature 1..21: note = n-mer motif encoding polynucleotide
  source 1..21: mol_type = other DNA
tctaaaggaaacgaacaaatg

SEQ ID NO: 5004 - DNA, 21 bp, synthetic construct
  source 1..21: mol_type = other DNA
  misc_feature 1..21: note = n-mer motif encoding polynucleotide
gcaaaccccaacatactagac

SEQ ID NO: 5005 - DNA, 21 bp, synthetic construct
  source 1..21: mol_type = other DNA
  misc_feature 1..21: note = n-mer motif encoding polynucleotide
cacaacaaaccaaacggagac

SEQ ID NO: 5006 - DNA, 21 bp, synthetic construct
  misc_feature 1..21: note = n-mer motif encoding polynucleotide
  source 1..21: mol_type = other DNA
gataagactgagatgctgcag

SEQ ID NO: 5007 - DNA, 21 bp, synthetic construct
  misc_feature 1..21: note = n-mer motif encoding polynucleotide
  source 1..21: mol_type = other DNA
acagaacaatcttactcacga

SEQ ID NO: 5008 - DNA, 21 bp, synthetic construct
  source 1..21: mol_type = other DNA
  misc_feature 1..21: note = n-mer motif encoding polynucleotide
actgtgatgatgagtacgagg

SEQ ID NO: 5009 - DNA, 21 bp, synthetic construct
  misc_feature 1..21: note = n-mer motif encoding polynucleotide
  source 1..21: mol_type = other DNA
gtctctacatacctcctggca

SEQ ID NO: 5010 - DNA, 21 bp, synthetic construct
  source 1..21: mol_type = other DNA
  misc_feature 1..21: note = n-mer motif encoding polynucleotide
cctaatgttacgcagtcttat

SEQ ID NO: 5011 - DNA, 21 bp, synthetic construct
  source 1..21: mol_type = other DNA
  misc_feature 1..21: note = n-mer motif encoding polynucleotide
atgagtaatttggggtatgag

SEQ ID NO: 5012 - DNA, 21 bp, synthetic construct
  source 1..21: mol_type = other DNA
  misc_feature 1..21: note = n-mer motif encoding polynucleotide
acgatgggtgctaatggtact

SEQ ID NO: 5013 - DNA, 21 bp, synthetic construct
  misc_feature 1..21: note = n-mer motif encoding polynucleotide
  source 1..21: mol_type = other DNA
aatgttaatgcgcagagtagg

SEQ ID NO: 5014 - DNA, 21 bp, synthetic construct
  misc_feature 1..21: note = n-mer motif encoding polynucleotide
  source 1..21: mol_type = other DNA
gaccaaaacttcgaacgtaga

SEQ ID NO: 5015 - DNA, 21 bp, synthetic construct
  source 1..21: mol_type = other DNA
  misc_feature 1..21: note = n-mer motif encoding polynucleotide
aacacgtacacaccgggaaaa

SEQ ID NO: 5016 - DNA, 21 bp, synthetic construct
  misc_feature 1..21: note = n-mer motif encoding polynucleotide
  source 1..21: mol_type = other DNA
cgtggggatatgattaatacg

SEQ ID NO: 5017 - DNA, 21 bp, synthetic construct
  source 1..21: mol_type = other DNA
  misc_feature 1..21: note = n-mer motif encoding polynucleotide
gcacaattcgaatcaggccga

SEQ ID NO: 5018 - DNA, 21 bp, synthetic construct
  misc_feature 1..21: note = n-mer motif encoding polynucleotide
  source 1..21: mol_type = other DNA
acggcgtatcaggctggtctg

SEQ ID NO: 5019 - DNA, 21 bp, synthetic construct
  source 1..21: mol_type = other DNA
  misc_feature 1..21: note = n-mer motif encoding polynucleotide
agtgttagttctgtggtgttg

SEQ ID NO: 5020 - DNA, 21 bp, synthetic construct
  source 1..21: mol_type = other DNA
  misc_feature 1..21: note = n-mer motif encoding polynucleotide
gggctttctaaggcgtctgat

SEQ ID NO: 5021 - DNA, 21 bp, synthetic construct
  source 1..21: mol_type = other DNA
  misc_feature 1..21: note = n-mer motif encoding polynucleotide
tggaacggaaacgccacacaa

SEQ ID NO: 5022 - DNA, 21 bp, synthetic construct
  source 1..21: mol_type = other DNA
  misc_feature 1..21: note = n-mer motif encoding polynucleotide
acagccggcggcgaacgcgcc

SEQ ID NO: 5023 - DNA, 21 bp, synthetic construct
  source 1..21: mol_type = other DNA
  misc_feature 1..21: note = n-mer motif encoding polynucleotide
tacacctctcaaaccagcact

SEQ ID NO: 5024 - DNA, 21 bp, synthetic construct
  misc_feature 1..21: note = n-mer motif encoding polynucleotide
  source 1..21: mol_type = other DNA
gcgaacatagaaaacacgtca

SEQ ID NO: 5025 - DNA, 21 bp, synthetic construct
  source 1..21: mol_type = other DNA
  misc_feature 1..21: note = n-mer motif encoding polynucleotide
gaactctccgttccgaaacca

SEQ ID NO: 5026 - DNA, 21 bp, synthetic construct
  source 1..21: mol_type = other DNA
  misc_feature 1..21: note = n-mer motif encoding polynucleotide
gatcctggtcggacgggtacg

SEQ ID NO: 5027 - DNA, 21 bp, synthetic construct
  misc_feature 1..21: note = n-mer motif encoding polynucleotide
  source 1..21: mol_type = other DNA
gatcgtccgaataatatgacg

SEQ ID NO: 5028 - DNA, 21 bp, synthetic construct
  source 1..21: mol_type = other DNA
  misc_feature 1..21: note = n-mer motif encoding polynucleotide
tatagtactgatcttaggatg

SEQ ID NO: 5029 - DNA, 21 bp, synthetic construct
  source 1..21: mol_type = other DNA
  misc_feature 1..21: note = n-mer motif encoding polynucleotide
cagtcggttaatagtacgagt

SEQ ID NO: 5030 - DNA, 21 bp, synthetic construct
  source 1..21: mol_type = other DNA
  misc_feature 1..21: note = n-mer motif encoding polynucleotide
gcggcacaactcgtcagtcca

SEQ ID NO: 5031 - DNA, 21 bp, synthetic construct
  misc_feature 1..21: note = n-mer motif encoding polynucleotide
  source 1..21: mol_type = other DNA
ctcggaggaaacagcaggttc

SEQ ID NO: 5032 - DNA, 21 bp, synthetic construct
  misc_feature 1..21: note = n-mer motif encoding polynucleotide
  source 1..21: mol_type = other DNA
gcgacgctgaataatagttat

SEQ ID NO: 5033 - DNA, 21 bp, synthetic construct
  source 1..21: mol_type = other DNA
  misc_feature 1..21: note = n-mer motif encoding polynucleotide
cgcttggacgttggaagcccg

SEQ ID NO: 5034 - DNA, 21 bp, synthetic construct
  misc_feature 1..21: note = n-mer motif encoding polynucleotide
  source 1..21: mol_type = other DNA
tatcggggtagggaggattgg

SEQ ID NO: 5035 - DNA, 21 bp, synthetic construct
  source 1..21: mol_type = other DNA
  misc_feature 1..21: note = n-mer motif encoding polynucleotide
aggggagatctttctacgcct

SEQ ID NO: 5036 - DNA, 21 bp, synthetic construct
  source 1..21: mol_type = other DNA
  misc_feature 1..21: note = n-mer motif encoding polynucleotide
agtggtctttcgcatggtcag

SEQ ID NO: 5037 - DNA, 21 bp, synthetic construct
  source 1..21: mol_type = other DNA
  misc_feature 1..21: note = n-mer motif encoding polynucleotide
gaacacgctacagcaaaacaa

SEQ ID NO: 5038 - DNA, 21 bp, synthetic construct
  misc_feature 1..21: note = n-mer motif encoding polynucleotide
  source 1..21: mol_type = other DNA
ggggcggaagcgggccgccaa

SEQ ID NO: 5039 - DNA, 21 bp, synthetic construct
  misc_feature 1..21: note = n-mer motif encoding polynucleotide
  source 1..21: mol_type = other DNA
ataagcggttccactacacac

SEQ ID NO: 5040 - DNA, 21 bp, synthetic construct
  misc_feature 1..21: note = n-mer motif encoding polynucleotide
  source 1..21: mol_type = other DNA
ggcaccgtcgttccgggctcc

SEQ ID NO: 5041 - DNA, 21 bp, synthetic construct
  misc_feature 1..21: note = n-mer motif encoding polynucleotide
  source 1..21: mol_type = other DNA
cataataataatatgctgaat

SEQ ID NO: 5042 - DNA, 21 bp, synthetic construct
  source 1..21: mol_type = other DNA
  misc_feature 1..21: note = n-mer motif encoding polynucleotide
cgtctgactgatactatgcat

SEQ ID NO: 5043 - DNA, 21 bp, synthetic construct
  misc_feature 1..21: note = n-mer motif encoding polynucleotide
  source 1..21: mol_type = other DNA
aacacctaccccttcaacgcc

SEQ ID NO: 5044 - DNA, 21 bp, synthetic construct
  source 1..21: mol_type = other DNA
  misc_feature 1..21: note = n-mer motif encoding polynucleotide
tcaaccactactggccacatg

SEQ ID NO: 5045 - DNA, 21 bp, synthetic construct
  misc_feature 1..21: note = n-mer motif encoding polynucleotide
  source 1..21: mol_type = other DNA
gtgcataatcctactactacg

SEQ ID NO: 5046 - DNA, 21 bp, synthetic construct
  source 1..21: mol_type = other DNA
  misc_feature 1..21: note = n-mer motif encoding polynucleotide
aatctgcaggtgaatgcgaat

SEQ ID NO: 5047 - DNA, 21 bp, synthetic construct
  source 1..21: mol_type = other DNA
  misc_feature 1..21: note = n-mer motif encoding polynucleotide
agatacggagaatccatcgaa

SEQ ID NO: 5048 - DNA, 21 bp, synthetic construct
  source 1..21: mol_type = other DNA
  misc_feature 1..21: note = n-mer motif encoding polynucleotide
aatactactccgcctaatcat

SEQ ID NO: 5049 - DNA, 21 bp, synthetic construct
  source 1..21: mol_type = other DNA
  misc_feature 1..21: note = n-mer motif encoding polynucleotide
aatactttgcagaatagtcat

SEQ ID NO: 5050 - DNA, 21 bp, synthetic construct
  source 1..21: mol_type = other DNA
  misc_feature 1..21: note = n-mer motif encoding polynucleotide
agtctgaacaacatgggatcg

SEQ ID NO: 5051 - DNA, 21 bp, synthetic construct
  source 1..21: mol_type = other DNA
  misc_feature 1..21: note = n-mer motif encoding polynucleotide
agaaacgaaaacgtaaacgct

SEQ ID NO: 5052 - DNA, 21 bp, synthetic construct
  source 1..21: mol_type = other DNA
  misc_feature 1..21: note = n-mer motif encoding polynucleotide
gctgtgcatgcgactagtagt

SEQ ID NO: 5053 - DNA, 21 bp, synthetic construct
  misc_feature 1..21: note = n-mer motif encoding polynucleotide
  source 1..21: mol_type = other DNA
acccaacacctaccatccaca

SEQ ID NO: 5054 - DNA, 21 bp, synthetic construct
  misc_feature 1..21: note = n-mer motif encoding polynucleotide
  source 1..21: mol_type = other DNA
agtgtgttgtctcaggctaat

SEQ ID NO: 5055 - DNA, 21 bp, synthetic construct
  misc_feature 1..21: note = n-mer motif encoding polynucleotide
  source 1..21: mol_type = other DNA
agtagctcaactgaagggcaa

SEQ ID NO: 5056 - DNA, 21 bp, synthetic construct
  misc_feature 1..21: note = n-mer motif encoding polynucleotide
  source 1..21: mol_type = other DNA
ggtcggacggatactcctaat

SEQ ID NO: 5057 - DNA, 21 bp, synthetic construct
  misc_feature 1..21: note = n-mer motif encoding polynucleotide
  source 1..21: mol_type = other DNA
gttcaaacccacataggagtc

SEQ ID NO: 5058 - DNA, 21 bp, synthetic construct
  misc_feature 1..21: note = n-mer motif encoding polynucleotide
  source 1..21: mol_type = other DNA
acttctgctagtgagaattgg

SEQ ID NO: 5059 - DNA, 21 bp, synthetic construct
  misc_feature 1..21: note = n-mer motif encoding polynucleotide
  source 1..21: mol_type = other DNA
ggaaaagccaacgacggttct

SEQ ID NO: 5060 - DNA, 21 bp, synthetic construct
  source 1..21: mol_type = other DNA
  misc_feature 1..21: note = n-mer motif encoding polynucleotide
gtggagcggaatactgatatg

SEQ ID NO: 5061 - DNA, 21 bp, synthetic construct
  misc_feature 1..21: note = n-mer motif encoding polynucleotide
  source 1..21: mol_type = other DNA
caaaaccacgcgtctggtgaa

SEQ ID NO: 5062 - DNA, 21 bp, synthetic construct
  source 1..21: mol_type = other DNA
  misc_feature 1..21: note = n-mer motif encoding polynucleotide
tattatgagaagcttagtgcg

SEQ ID NO: 5063 - DNA, 21 bp, synthetic construct
  source 1..21: mol_type = other DNA
  misc_feature 1..21: note = n-mer motif encoding polynucleotide
ttcatcgctaacactaaccca

SEQ ID NO: 5064 - DNA, 21 bp, synthetic construct
  misc_feature 1..21: note = n-mer motif encoding polynucleotide
  source 1..21: mol_type = other DNA
acctccacggcttcaaaacaa

SEQ ID NO: 5065 - DNA, 21 bp, synthetic construct
  misc_feature 1..21: note = n-mer motif encoding polynucleotide
  source 1..21: mol_type = other DNA
aataatgataatggttttgtt

SEQ ID NO: 5066 - DNA, 21 bp, synthetic construct
  source 1..21: mol_type = other DNA
  misc_feature 1..21: note = n-mer motif encoding polynucleotide
gctaattctattgggggtccg

SEQ ID NO: 5067 - DNA, 21 bp, synthetic construct
  misc_feature 1..21: note = n-mer motif encoding polynucleotide
  source 1..21: mol_type = other DNA
actggccaattagtaggaacc

SEQ ID NO: 5068 - DNA, 21 bp, synthetic construct
  misc_feature 1..21: note = n-mer motif encoding polynucleotide
  source 1..21: mol_type = other DNA
tacagtcaatcgctgtctgaa

SEQ ID NO: 5069 - DNA, 21 bp, synthetic construct
  misc_feature 1..21: note = n-mer motif encoding polynucleotide
  source 1..21: mol_type = other DNA
gtctacaacggcaacgtagta

SEQ ID NO: 5070 - DNA, 21 bp, synthetic construct
  misc_feature 1..21: note = n-mer motif encoding polynucleotide
  source 1..21: mol_type = other DNA
aactcggctgaatcctcgaga

SEQ ID NO: 5071 - DNA, 21 bp, synthetic construct
  source 1..21: mol_type = other DNA
  misc_feature 1..21: note = n-mer motif encoding polynucleotide
acgcgtaatttgtctgagagt

SEQ ID NO: 5072 - DNA, 21 bp, synthetic construct
  misc_feature 1..21: note = n-mer motif encoding polynucleotide
  source 1..21: mol_type = other DNA
tctatgtctgatgggcttcgg

SEQ ID NO: 5073 - DNA, 21 bp, synthetic construct
  misc_feature 1..21: note = n-mer motif encoding polynucleotide
  source 1..21: mol_type = other DNA
gtaggcgaccaatcccgcccg

SEQ ID NO: 5074 - DNA, 21 bp, synthetic construct
  misc_feature 1..21: note = n-mer motif encoding polynucleotide
  source 1..21: mol_type = other DNA
tttacggtgaatcaggatctt

SEQ ID NO: 5075 - DNA, 21 bp, synthetic construct
  source 1..21: mol_type = other DNA
  misc_feature 1..21: note = n-mer motif encoding polynucleotide
tatcataagtatagtacggat

SEQ ID NO: 5076 - DNA, 21 bp, synthetic construct
  misc_feature 1..21: note = n-mer motif encoding polynucleotide
  source 1..21: mol_type = other DNA
tatggtgtgcaggcgaatagt

SEQ ID NO: 5077 - DNA, 21 bp, synthetic construct
  misc_feature 1..21: note = n-mer motif encoding polynucleotide
  source 1..21: mol_type = other DNA
ttgcagacgcctgggacgacg

SEQ ID NO: 5078 - DNA, 21 bp, synthetic construct
  source 1..21: mol_type = other DNA
  misc_feature 1..21: note = n-mer motif encoding polynucleotide
tatcagcagacttctagtacg

SEQ ID NO: 5079 - DNA, 21 bp, synthetic construct
  source 1..21: mol_type = other DNA
  misc_feature 1..21: note = n-mer motif encoding polynucleotide
caaacgaacaccaacgacaga

SEQ ID NO: 5080 - DNA, 21 bp, synthetic construct
  misc_feature 1..21: note = n-mer motif encoding polynucleotide
  source 1..21: mol_type = other DNA
atggataagtctaataattct

SEQ ID NO: 5081 - DNA, 21 bp, synthetic construct
  misc_feature 1..21: note = n-mer motif encoding polynucleotide
  source 1..21: mol_type = other DNA
catcttagtcaggctaatcat

SEQ ID NO: 5082 - DNA, 21 bp, synthetic construct
  misc_feature 1..21: note = n-mer motif encoding polynucleotide
  source 1..21: mol_type = other DNA
gttggtgcgagtacggcttcg

SEQ ID NO: 5083 - DNA, 21 bp, synthetic construct
  source 1..21: mol_type = other DNA
  misc_feature 1..21: note = n-mer motif encoding polynucleotide
cacaacaacaacctgcaaaac

SEQ ID NO: 5084 - DNA, 21 bp, synthetic construct
  source 1..21: mol_type = other DNA
  misc_feature 1..21: note = n-mer motif encoding polynucleotide
agtacttatgggaatacttat

SEQ ID NO: 5085 - DNA, 21 bp, synthetic construct
  source 1..21: mol_type = other DNA
  misc_feature 1..21: note = n-mer motif encoding polynucleotide
cgggctgatgtttcttggtct

SEQ ID NO: 5086 - DNA, 21 bp, synthetic construct
  source 1..21: mol_type = other DNA
  misc_feature 1..21: note = n-mer motif encoding polynucleotide
cgaggagacaacagcacaccg

SEQ ID NO: 5087 - DNA, 21 bp, synthetic construct
  misc_feature 1..21: note = n-mer motif encoding polynucleotide
  source 1..21: mol_type = other DNA
ggtcgggattatgctatgagt

SEQ ID NO: 5088 - DNA, 21 bp, synthetic construct
  source 1..21: mol_type = other DNA
  misc_feature 1..21: note = n-mer motif encoding polynucleotide
cctaacaacgaaaaaaacccg

SEQ ID NO: 5089 - DNA, 21 bp, synthetic construct
  source 1..21: mol_type = other DNA
  misc_feature 1..21: note = n-mer motif encoding polynucleotide
gataatgtgaattctcagcct

SEQ ID NO: 5090 - DNA, 21 bp, synthetic construct
  source 1..21: mol_type = other DNA
  misc_feature 1..21: note = n-mer motif encoding polynucleotide
atggggactgagtatcgtatg

SEQ ID NO: 5091 - DNA, 21 bp, synthetic construct
  source 1..21: mol_type = other DNA
  misc_feature 1..21: note = n-mer motif encoding polynucleotide
aatcagagtattaataatatt

SEQ ID NO: 5092 - DNA, 21 bp, synthetic construct
  misc_feature 1..21: note = n-mer motif encoding polynucleotide
  source 1..21: mol_type = other DNA
gccatagactctatcaaacaa

SEQ ID NO: 5093 - DNA, 21 bp, synthetic construct
  source 1..21: mol_type = other DNA
  misc_feature 1..21: note = n-mer motif encoding polynucleotide
gttgagtcttcttattctcgg

SEQ ID NO: 5094 - DNA, 21 bp, synthetic construct
  source 1..21: mol_type = other DNA
  misc_feature 1..21: note = n-mer motif encoding polynucleotide
ggtcagtatagtcagacgctt

SEQ ID NO: 5095 - DNA, 21 bp, synthetic construct
  source 1..21: mol_type = other DNA
  misc_feature 1..21: note = n-mer motif encoding polynucleotide
accatccaagaccacataaaa

SEQ ID NO: 5096 - DNA, 21 bp, synthetic construct
  misc_feature 1..21: note = n-mer motif encoding polynucleotide
  source 1..21: mol_type = other DNA
aacagttcccaatggcccaac

SEQ ID NO: 5097 - DNA, 21 bp, synthetic construct
  source 1..21: mol_type = other DNA
  misc_feature 1..21: note = n-mer motif encoding polynucleotide
acggataatggtcttcttgtg

SEQ ID NO: 5098 - DNA, 21 bp, synthetic construct
  misc_feature 1..21: note = n-mer motif encoding polynucleotide
  source 1..21: mol_type = other DNA
gtaagagaaaccacacacctc

SEQ ID NO: 5099 - DNA, 21 bp, synthetic construct
  source 1..21: mol_type = other DNA
  misc_feature 1..21: note = n-mer motif encoding polynucleotide
cgtggtgatatgactcgtgcg

SEQ ID NO: 5100 - DNA, 21 bp, synthetic construct
  misc_feature 1..21: note = n-mer motif encoding polynucleotide
  source 1..21: mol_type = other DNA
acttatggtattactcatgat

SEQ ID NO: 5101 - DNA, 21 bp, synthetic construct
  misc_feature 1..21: note = n-mer motif encoding polynucleotide
  source 1..21: mol_type = other DNA
acggcgctgaatacgtatcct

SEQ ID NO: 5102 - DNA, 21 bp, synthetic construct
  misc_feature 1..21: note = n-mer motif encoding polynucleotide
  source 1..21: mol_type = other DNA
ggtggcgaaaacagaacccca

SEQ ID NO: 5103 - DNA, 21 bp, synthetic construct
  misc_feature 1..21: note = n-mer motif encoding polynucleotide
  source 1..21: mol_type = other DNA
tatctgcaggagaagtttcct

SEQ ID NO: 5104 - DNA, 21 bp, synthetic construct
  source 1..21: mol_type = other DNA
  misc_feature 1..21: note = n-mer motif encoding polynucleotide
cttaatcttactaatcataat

SEQ ID NO: 5105 - DNA, 21 bp, synthetic construct
  source 1..21: mol_type = other DNA
  misc_feature 1..21: note = n-mer motif encoding polynucleotide
ggattagctagtctacacctg

SEQ ID NO: 5106 - DNA, 21 bp, synthetic construct
  source 1..21: mol_type = other DNA
  misc_feature 1..21: note = n-mer motif encoding polynucleotide
gtagaacacgtagcccaccaa

SEQ ID NO: 5107 - DNA, 21 bp, synthetic construct
  source 1..21: mol_type = other DNA
  misc_feature 1..21: note = n-mer motif encoding polynucleotide
agcgaacaccacgccggaata

SEQ ID NO: 5108 - DNA, 21 bp, synthetic construct
  misc_feature 1..21: note = n-mer motif encoding polynucleotide
  source 1..21: mol_type = other DNA
gaagcgtccaactacgaacga

SEQ ID NO: 5109 - DNA, 21 bp, synthetic construct
  misc_feature 1..21: note = n-mer motif encoding polynucleotide
  source 1..21: mol_type = other DNA
ccctccaacagtgaaagattc

SEQ ID NO: 5110 - DNA, 21 bp, synthetic construct
  source 1..21: mol_type = other DNA
  misc_feature 1..21: note = n-mer motif encoding polynucleotide
tcccccggcaacgggttgcta

SEQ ID NO: 5111 - DNA, 21 bp, synthetic construct
  misc_feature 1..21: note = n-mer motif encoding polynucleotide
  source 1..21: mol_type = other DNA
atactgaaatccgacgcacca

SEQ ID NO: 5112 - DNA, 21 bp, synthetic construct
  source 1..21: mol_type = other DNA
  misc_feature 1..21: note = n-mer motif encoding polynucleotide
tttgatagtgcgaatggtcgg

SEQ ID NO: 5113 - DNA, 21 bp, synthetic construct
  misc_feature 1..21: note = n-mer motif encoding polynucleotide
  source 1..21: mol_type = other DNA
gatggtaagactacgtctaat

SEQ ID NO: 5114 - DNA, 21 bp, synthetic construct
  misc_feature 1..21: note = n-mer motif encoding polynucleotide
  source 1..21: mol_type = other DNA
actaattatcctgaggcgaat

SEQ ID NO: 5115 - DNA, 21 bp, synthetic construct
  misc_feature 1..21: note = n-mer motif encoding polynucleotide
  source 1..21: mol_type = other DNA
cgaggagaccacagcacaccg

SEQ ID NO: 5116 - DNA, 21 bp, synthetic construct
  source 1..21: mol_type = other DNA
  misc_feature 1..21: note = n-mer motif encoding polynucleotide
cagacgactattctggctgct

SEQ ID NO: 5117 - DNA, 21 bp, synthetic construct
  source 1..21: mol_type = other DNA
  misc_feature 1..21: note = n-mer motif encoding polynucleotide
gctactgcgcatcaggatggt

SEQ ID NO: 5118 - DNA, 21 bp, synthetic construct
  misc_feature 1..21: note = n-mer motif encoding polynucleotide
  source 1..21: mol_type = other DNA
caagccctggccaccacaaac

SEQ ID NO: 5119 - DNA, 21 bp, synthetic construct
  source 1..21: mol_type = other DNA
  misc_feature 1..21: note = n-mer motif encoding polynucleotide
tataatgctactccttcgcag

SEQ ID NO: 5120 - DNA, 21 bp, synthetic construct
  source 1..21: mol_type = other DNA
  misc_feature 1..21: note = n-mer motif encoding polynucleotide
gagctgtctactcctatggtt

SEQ ID NO: 5121 - DNA, 21 bp, synthetic construct
  misc_feature 1..21: note = n-mer motif encoding polynucleotide
  source 1..21: mol_type = other DNA
attaatattagtagtgatttt

SEQ ID NO: 5122 - DNA, 21 bp, synthetic construct
  source 1..21: mol_type = other DNA
  misc_feature 1..21: note = n-mer motif encoding polynucleotide
gtaacggcacaccaattatcc

SEQ ID NO: 5123 - DNA, 21 bp, synthetic construct
  source 1..21: mol_type = other DNA
  misc_feature 1..21: note = n-mer motif encoding polynucleotide
ggagaaagctcctcaataagc

SEQ ID NO: 5124 - DNA, 21 bp, synthetic construct
  source 1..21: mol_type = other DNA
  misc_feature 1..21: note = n-mer motif encoding polynucleotide
gaatccctcccaatctctaaa

SEQ ID NO: 5125 - DNA, 21 bp, synthetic construct
  source 1..21: mol_type = other DNA
  misc_feature 1..21: note = n-mer motif encoding polynucleotide
acgaatgttagtacgcttttg

SEQ ID NO: 5126 - DNA, 21 bp, synthetic construct
  misc_feature 1..21: note = n-mer motif encoding polynucleotide
  source 1..21: mol_type = other DNA
tggcagacgaatggtatgcag

SEQ ID NO: 5127 - DNA, 21 bp, synthetic construct
  misc_feature 1..21: note = n-mer motif encoding polynucleotide
  source 1..21: mol_type = other DNA
tacaggatggaaacgaaccca

SEQ ID NO: 5128 - DNA, 21 bp, synthetic construct
  source 1..21: mol_type = other DNA
  misc_feature 1..21: note = n-mer motif encoding polynucleotide
ataaccggcaacaccgtcgga

SEQ ID NO: 5129 - DNA, 21 bp, synthetic construct
  source 1..21: mol_type = other DNA
  misc_feature 1..21: note = n-mer motif encoding polynucleotide
ctgaacactctaatccacaaa

SEQ ID NO: 5130 - DNA, 21 bp, synthetic construct
  source 1..21: mol_type = other DNA
  misc_feature 1..21: note = n-mer motif encoding polynucleotide
gggacttccttggaaaaccga

SEQ ID NO: 5131 - DNA, 21 bp, synthetic construct
  source 1..21: mol_type = other DNA
  misc_feature 1..21: note = n-mer motif encoding polynucleotide
taccaacacaaccaagcccac

SEQ ID NO: 5132 - DNA, 21 bp, synthetic construct
  misc_feature 1..21: note = n-mer motif encoding polynucleotide
  source 1..21: mol_type = other DNA
attgagagtaagactgtgcag

SEQ ID NO: 5133 - DNA, 21 bp, synthetic construct
  source 1..21: mol_type = other DNA
  misc_feature 1..21: note = n-mer motif encoding polynucleotide
tatacgcagggtattatgaat

SEQ ID NO: 5134 - DNA, 21 bp, synthetic construct
  misc_feature 1..21: note = n-mer motif encoding polynucleotide
  source 1..21: mol_type = other DNA
agtacgaatgaggctcctaag

SEQ ID NO: 5135 - DNA, 21 bp, synthetic construct
  source 1..21: mol_type = other DNA
  misc_feature 1..21: note = n-mer motif encoding polynucleotide
ttgtctcagaattttaatcct

SEQ ID NO: 5136 - DNA, 21 bp, synthetic construct
  source 1..21: mol_type = other DNA
  misc_feature 1..21: note = n-mer motif encoding polynucleotide
tactcttctgaaatgagcgaa

SEQ ID NO: 5137 - DNA, 21 bp, synthetic construct
  misc_feature 1..21: note = n-mer motif encoding polynucleotide
  source 1..21: mol_type = other DNA
tcatacggaggatctggcccc

SEQ ID NO: 5138 - DNA, 21 bp, synthetic construct
  source 1..21: mol_type = other DNA
  misc_feature 1..21: note = n-mer motif encoding polynucleotide
atggacgctgcgtacggtagt

SEQ ID NO: 5139 - DNA, 21 bp, synthetic construct
  source 1..21: mol_type = other DNA
  misc_feature 1..21: note = n-mer motif encoding polynucleotide
ccttttaatcctgggaatgtg

SEQ ID NO: 5140 - DNA, 21 bp, synthetic construct
  misc_feature 1..21: note = n-mer motif encoding polynucleotide
  source 1..21: mol_type = other DNA
caaaaatcggaaacctacact

SEQ ID NO: 5141 - DNA, 21 bp, synthetic construct
  misc_feature 1..21: note = n-mer motif encoding polynucleotide
  source 1..21: mol_type = other DNA
aacaaagaccacaaccacctg

SEQ ID NO: 5142 - DNA, 21 bp, synthetic construct
  source 1..21: mol_type = other DNA
  misc_feature 1..21: note = n-mer motif encoding polynucleotide
ctaaccggctctgacatgaaa

SEQ ID NO: 5143 - DNA, 21 bp, synthetic construct
  misc_feature 1..21: note = n-mer motif encoding polynucleotide
  source 1..21: mol_type = other DNA
tctaaggatagtactatgtat

SEQ ID NO: 5144 - DNA, 21 bp, synthetic construct
  misc_feature 1..21: note = n-mer motif encoding polynucleotide
  source 1..21: mol_type = other DNA
gaagcattcccgcgagcgggc

SEQ ID NO: 5145 - DNA, 21 bp, synthetic construct
  misc_feature 1..21: note = n-mer motif encoding polynucleotide
  source 1..21: mol_type = other DNA
gaacacactcacttaaacccg

SEQ ID NO: 5146 - DNA, 21 bp, synthetic construct
  misc_feature 1..21: note = n-mer motif encoding polynucleotide
  source 1..21: mol_type = other DNA
agttcggacccaaaaggtcaa

SEQ ID NO: 5147 - DNA, 21 bp, synthetic construct
  source 1..21: mol_type = other DNA
  misc_feature 1..21: note = n-mer motif encoding polynucleotide
aaaaccatcgacatagcacaa

SEQ ID NO: 5148 - DNA, 21 bp, synthetic construct
  misc_feature 1..21: note = n-mer motif encoding polynucleotide
  source 1..21: mol_type = other DNA
accggtagcttgaactctatg

SEQ ID NO: 5149 - DNA, 21 bp, synthetic construct
  source 1..21: mol_type = other DNA
  misc_feature 1..21: note = n-mer motif encoding polynucleotide
atgcaacgcgaagacgcgaac

SEQ ID NO: 5150 - DNA, 21 bp, synthetic construct
  misc_feature 1..21: note = n-mer motif encoding polynucleotide
  source 1..21: mol_type = other DNA
gcctctacagtctcactctac

SEQ ID NO: 5151 - DNA, 21 bp, synthetic construct
  misc_feature 1..21: note = n-mer motif encoding polynucleotide
  source 1..21: mol_type = other DNA
ggccgtgacgacctcacaaac

SEQ ID NO: 5152 - DNA, 21 bp, synthetic construct
  source 1..21: mol_type = other DNA
  misc_feature 1..21: note = n-mer motif encoding polynucleotide
tctaatccgggtaatcataat

SEQ ID NO: 5153 - DNA, 21 bp, synthetic construct
  misc_feature 1..21: note = n-mer motif encoding polynucleotide
  source 1..21: mol_type = other DNA
gatacttataagggtaagtgg

SEQ ID NO: 5154 - DNA, 21 bp, synthetic construct
  misc_feature 1..21: note = n-mer motif encoding polynucleotide
  source 1..21: mol_type = other DNA
ccacccaacggcagcagtaga

SEQ ID NO: 5155 - DNA, 21 bp, synthetic construct
  source 1..21: mol_type = other DNA
  misc_feature 1..21: note = n-mer motif encoding polynucleotide
gcttcttatagtatttctgat

SEQ ID NO: 5156 - DNA, 21 bp, synthetic construct
  source 1..21: mol_type = other DNA
  misc_feature 1..21: note = n-mer motif encoding polynucleotide
gtgactgttagtctggatggg

SEQ ID NO: 5157 - DNA, 21 bp, synthetic construct
  source 1..21: mol_type = other DNA
  misc_feature 1..21: note = n-mer motif encoding polynucleotide
atggccataggccactcccca

SEQ ID NO: 5158 - DNA, 21 bp, synthetic construct
  source 1..21: mol_type = other DNA
  misc_feature 1..21: note = n-mer motif encoding polynucleotide
tttcggacggtgtatactggt

SEQ ID NO: 5159 - DNA, 21 bp, synthetic construct
  source 1..21: mol_type = other DNA
  misc_feature 1..21: note = n-mer motif encoding polynucleotide
aaaaaacggcagcccatcgcc

SEQ ID NO: 5160 - DNA, 21 bp, synthetic construct
  source 1..21: mol_type = other DNA
  misc_feature 1..21: note = n-mer motif encoding polynucleotide
aaaaataagctctactatggc

SEQ ID NO: 5161 - DNA, 21 bp, synthetic construct
  source 1..21: mol_type = other DNA
  misc_feature 1..21: note = n-mer motif encoding polynucleotide
tctacatctccggttaacagc

SEQ ID NO: 5162 - DNA, 21 bp, synthetic construct
  source 1..21: mol_type = other DNA
  misc_feature 1..21: note = n-mer motif encoding polynucleotide
gggtctgggattgcggggact

SEQ ID NO: 5163 - DNA, 21 bp, synthetic construct
  misc_feature 1..21: note = n-mer motif encoding polynucleotide
  source 1..21: mol_type = other DNA
atcgacgtactgaacggaagt

SEQ ID NO: 5164 - DNA, 21 bp, synthetic construct
  source 1..21: mol_type = other DNA
  misc_feature 1..21: note = n-mer motif encoding polynucleotide
ggtcataatatggcacaggcg

SEQ ID NO: 5165 - DNA, 21 bp, synthetic construct
  source 1..21: mol_type = other DNA
  misc_feature 1..21: note = n-mer motif encoding polynucleotide
acgaggagcaactccgacgaa

SEQ ID NO: 5166 - DNA, 21 bp, synthetic construct
  source 1..21: mol_type = other DNA
  misc_feature 1..21: note = n-mer motif encoding polynucleotide
ggagcaaaaggaaccatgggc

SEQ ID NO: 5167 - DNA, 21 bp, synthetic construct
  misc_feature 1..21: note = n-mer motif encoding polynucleotide
  source 1..21: mol_type = other DNA
gctactactcttactggtgat

SEQ ID NO: 5168 - DNA, 21 bp, synthetic construct
  source 1..21: mol_type = other DNA
  misc_feature 1..21: note = n-mer motif encoding polynucleotide
ttcaacacatcgtcggaattc

SEQ ID NO: 5169 - DNA, 21 bp, synthetic construct
  misc_feature 1..21: note = n-mer motif encoding polynucleotide
  source 1..21: mol_type = other DNA
tatacggcgcagaccggctgg

SEQ ID NO: 5170 - DNA, 21 bp, synthetic construct
  misc_feature 1..21: note = n-mer motif encoding polynucleotide
  source 1..21: mol_type = other DNA
cgagtaaacaacgacgcaata

SEQ ID NO: 5171 - DNA, 21 bp, synthetic construct
  misc_feature 1..21: note = n-mer motif encoding polynucleotide
  source 1..21: mol_type = other DNA
actattcagcttactgatact

SEQ ID NO: 5172 - DNA, 21 bp, synthetic construct
  misc_feature 1..21: note = n-mer motif encoding polynucleotide
  source 1..21: mol_type = other DNA
gccagcatgccctctgtagac

SEQ ID NO: 5173 - DNA, 21 bp, synthetic construct
  misc_feature 1..21: note = n-mer motif encoding polynucleotide
  source 1..21: mol_type = other DNA
aatcaggtgggtgcgtctgcg

SEQ ID NO: 5174 - DNA, 21 bp, synthetic construct
  source 1..21: mol_type = other DNA
  misc_feature 1..21: note = n-mer motif encoding polynucleotide
ggaaacatggtgactccaaac

SEQ ID NO: 5175 - DNA, 21 bp, synthetic construct
  source 1..21: mol_type = other DNA
  misc_feature 1..21: note = n-mer motif encoding polynucleotide
cgtggtgaccaaggcacacac

SEQ ID NO: 5176 - DNA, 21 bp, synthetic construct
  source 1..21: mol_type = other DNA
  misc_feature 1..21: note = n-mer motif encoding polynucleotide
tcgagtgattctcgtattccg

SEQ ID NO: 5177 - DNA, 21 bp, synthetic construct
  source 1..21: mol_type = other DNA
  misc_feature 1..21: note = n-mer motif encoding polynucleotide
ggactgcacggcaccaacgca

SEQ ID NO: 5178 - DNA, 21 bp, synthetic construct
  misc_feature 1..21: note = n-mer motif encoding polynucleotide
  source 1..21: mol_type = other DNA
tctagttatcagtctgggctg

SEQ ID NO: 5179 - DNA, 21 bp, synthetic construct
  misc_feature 1..21: note = n-mer motif encoding polynucleotide
  source 1..21: mol_type = other DNA
acagcctactcgcccacagtc

SEQ ID NO: 5180 - DNA, 21 bp, synthetic construct
  source 1..21: mol_type = other DNA
  misc_feature 1..21: note = n-mer motif encoding polynucleotide
cgcagtgacaccactaacgcc

SEQ ID NO: 5181 - DNA, 21 bp, synthetic construct
  misc_feature 1..21: note = n-mer motif encoding polynucleotide
  source 1..21: mol_type = other DNA
cgtattgtggctaatgagcag

SEQ ID NO: 5182 - DNA, 21 bp, synthetic construct
  misc_feature 1..21: note = n-mer motif encoding polynucleotide
  source 1..21: mol_type = other DNA
atccacaacgaatcatacgtc

SEQ ID NO: 5183 - DNA, 21 bp, synthetic construct
  source 1..21: mol_type = other DNA
  misc_feature 1..21: note = n-mer motif encoding polynucleotide
cagcagaatacgcgtttgccg

SEQ ID NO: 5184 - DNA, 21 bp, synthetic construct
  misc_feature 1..21: note = n-mer motif encoding polynucleotide
  source 1..21: mol_type = other DNA
ggtatcaactcctcacacttc

SEQ ID NO: 5185 - DNA, 21 bp, synthetic construct
  misc_feature 1..21: note = n-mer motif encoding polynucleotide
  source 1..21: mol_type = other DNA
ggtatgacttctaatcaggtt

SEQ ID NO: 5186 - DNA, 21 bp, synthetic construct
  misc_feature 1..21: note = n-mer motif encoding polynucleotide
  source 1..21: mol_type = other DNA
agggagattgttcatagtaat

SEQ ID NO: 5187 - DNA, 21 bp, synthetic construct
  misc_feature 1..21: note = n-mer motif encoding polynucleotide
  source 1..21: mol_type = other DNA
gcagaacacacgtacacggtc

SEQ ID NO: 5188 - DNA, 21 bp, synthetic construct
  source 1..21: mol_type = other DNA
  misc_feature 1..21: note = n-mer motif encoding polynucleotide
cctgctacgctacacctgaca

SEQ ID NO: 5189 - DNA, 21 bp, synthetic construct
  source 1..21: mol_type = other DNA
  misc_feature 1..21: note = n-mer motif encoding polynucleotide
aagcagactgatagtaggggt

SEQ ID NO: 5190 - DNA, 21 bp, synthetic construct
  misc_feature 1..21: note = n-mer motif encoding polynucleotide
  source 1..21: mol_type = other DNA
actatggtagaagtactgcca

SEQ ID NO: 5191 - DNA, 21 bp, synthetic construct
  source 1..21: mol_type = other DNA
  misc_feature 1..21: note = n-mer motif encoding polynucleotide
atcccaaccggccaaactagc

SEQ ID NO: 5192 - DNA, 21 bp, synthetic construct
  misc_feature 1..21: note = n-mer motif encoding polynucleotide
  source 1..21: mol_type = other DNA
atgataaaaaccaacatgttg

SEQ ID NO: 5193 - DNA, 21 bp, synthetic construct
  misc_feature 1..21: note = n-mer motif encoding polynucleotide
  source 1..21: mol_type = other DNA
gcggaacgacccactagagac

SEQ ID NO: 5194 - DNA, 21 bp, synthetic construct
  source 1..21: mol_type = other DNA
  misc_feature 1..21: note = n-mer motif encoding polynucleotide
cgggatctggggcagaccggc

SEQ ID NO: 5195 - DNA, 21 bp, synthetic construct
  source 1..21: mol_type = other DNA
  misc_feature 1..21: note = n-mer motif encoding polynucleotide
aatgaggggcgtgtgcagact

SEQ ID NO: 5196 - DNA, 21 bp, synthetic construct
  misc_feature 1..21: note = n-mer motif encoding polynucleotide
  source 1..21: mol_type = other DNA
actgcggctagtactgcgagg

SEQ ID NO: 5197 - DNA, 21 bp, synthetic construct
  source 1..21: mol_type = other DNA
  misc_feature 1..21: note = n-mer motif encoding polynucleotide
acccaagggaacaacatggta

SEQ ID NO: 5198 - DNA, 21 bp, synthetic construct
  source 1..21: mol_type = other DNA
  misc_feature 1..21: note = n-mer motif encoding polynucleotide
catagtacttttcctacgact

SEQ ID NO: 5199 - DNA, 21 bp, synthetic construct
  source 1..21: mol_type = other DNA
  misc_feature 1..21: note = n-mer motif encoding polynucleotide
caatctatcggccaccccgtt

SEQ ID NO: 5200 - DNA, 21 bp, synthetic construct
  misc_feature 1..21: note = n-mer motif encoding polynucleotide
  source 1..21: mol_type = other DNA
tcgggtgttaatagtgagcgt

SEQ ID NO: 5201 - DNA, 21 bp, synthetic construct
  source 1..21: mol_type = other DNA
  misc_feature 1..21: note = n-mer motif encoding polynucleotide
cctcacgccaacggagtgaca

SEQ ID NO: 5202 - DNA, 21 bp, synthetic construct
  source 1..21: mol_type = other DNA
  misc_feature 1..21: note = n-mer motif encoding polynucleotide
gaccaccaacaagccctagct

SEQ ID NO: 5203 - DNA, 21 bp, synthetic construct
  source 1..21: mol_type = other DNA
  misc_feature 1..21: note = n-mer motif encoding polynucleotide
agtcagcagggttttactctg

SEQ ID NO: 5204 - DNA, 21 bp, synthetic construct
  misc_feature 1..21: note = n-mer motif encoding polynucleotide
  source 1..21: mol_type = other DNA
acaaacgctgctctagtacca

SEQ ID NO: 5205 - DNA, 21 bp, synthetic construct
  misc_feature 1..21: note = n-mer motif encoding polynucleotide
  source 1..21: mol_type = other DNA
ggtgttagtagtaattctgcg

SEQ ID NO: 5206 - DNA, 21 bp, synthetic construct
  source 1..21: mol_type = other DNA
  misc_feature 1..21: note = n-mer motif encoding polynucleotide
catgatacggttggggagagg

SEQ ID NO: 5207 - DNA, 21 bp, synthetic construct
  source 1..21: mol_type = other DNA
  misc_feature 1..21: note = n-mer motif encoding polynucleotide
gcgttaaacgcccaagggatc

SEQ ID NO: 5208 - DNA, 21 bp, synthetic construct
  misc_feature 1..21: note = n-mer motif encoding polynucleotide
  source 1..21: mol_type = other DNA
catgatagtatgtgttgtgcg

SEQ ID NO: 5209 - DNA, 21 bp, synthetic construct
  misc_feature 1..21: note = n-mer motif encoding polynucleotide
  source 1..21: mol_type = other DNA
tacatcgcggcaggggaacaa

SEQ ID NO: 5210 - DNA, 21 bp, synthetic construct
  source 1..21: mol_type = other DNA
  misc_feature 1..21: note = n-mer motif encoding polynucleotide
gagaatgctcgtgagggtgtg

SEQ ID NO: 5211 - DNA, 21 bp, synthetic construct
  source 1..21: mol_type = other DNA
  misc_feature 1..21: note = n-mer motif encoding polynucleotide
gctacggtttataatgagttg

SEQ ID NO: 5212 - DNA, 21 bp, synthetic construct
  misc_feature 1..21: note = n-mer motif encoding polynucleotide
  source 1..21: mol_type = other DNA
gacactaacggaataaaatca

SEQ ID NO: 5213 - DNA, 21 bp, synthetic construct
  source 1..21: mol_type = other DNA
  misc_feature 1..21: note = n-mer motif encoding polynucleotide
aagccgactgcgaatgattgg

SEQ ID NO: 5214 - DNA, 21 bp, synthetic construct
  misc_feature 1..21: note = n-mer motif encoding polynucleotide
  source 1..21: mol_type = other DNA
tatgagagtactcatgttaat

SEQ ID NO: 5215 - DNA, 21 bp, synthetic construct
  misc_feature 1..21: note = n-mer motif encoding polynucleotide
  source 1..21: mol_type = other DNA
tacaccaacgggggccaccta

SEQ ID NO: 5216 - DNA, 21 bp, synthetic construct
  misc_feature 1..21: note = n-mer motif encoding polynucleotide
  source 1..21: mol_type = other DNA
gtagacaaatctagcccagtg

SEQ ID NO: 5217 - DNA, 21 bp, synthetic construct
  source 1..21: mol_type = other DNA
  misc_feature 1..21: note = n-mer motif encoding polynucleotide
ccaatccaaaacgaatcgtcc

SEQ ID NO: 5218 - DNA, 21 bp, synthetic construct
  misc_feature 1..21: note = n-mer motif encoding polynucleotide
  source 1..21: mol_type = other DNA
atacacaaatctagcgtcgaa

SEQ ID NO: 5219 - DNA, 21 bp, synthetic construct
  misc_feature 1..21: note = n-mer motif encoding polynucleotide
  source 1..21: mol_type = other DNA
catgatattagtctggatcgt

SEQ ID NO: 5220 - DNA, 21 bp, synthetic construct
  source 1..21: mol_type = other DNA
  misc_feature 1..21: note = n-mer motif encoding polynucleotide
tggtgaggggctgagtttgcc

SEQ ID NO: 5221 - DNA, 21 bp, synthetic construct
  misc_feature 1..21: note = n-mer motif encoding polynucleotide
  source 1..21: mol_type = other DNA
tactctcaatccataaaaaac

SEQ ID NO: 5222 - DNA, 21 bp, synthetic construct
  misc_feature 1..21: note = n-mer motif encoding polynucleotide
  source 1..21: mol_type = other DNA
gcccaagacaacaaccacgac

SEQ ID NO: 5223 - DNA, 21 bp, synthetic construct
  source 1..21: mol_type = other DNA
  misc_feature 1..21: note = n-mer motif encoding polynucleotide
gggcagaaggagactactgcg

SEQ ID NO: 5224 - DNA, 21 bp, synthetic construct
  source 1..21: mol_type = other DNA
  misc_feature 1..21: note = n-mer motif encoding polynucleotide
aaaagcgaagtacccgcccga

SEQ ID NO: 5225 - DNA, 21 bp, synthetic construct
  misc_feature 1..21: note = n-mer motif encoding polynucleotide
  source 1..21: mol_type = other DNA
gaacttaacaccgcacacgca

SEQ ID NO: 5226 - DNA, 21 bp, synthetic construct
  misc_feature 1..21: note = n-mer motif encoding polynucleotide
  source 1..21: mol_type = other DNA
agcacaaacgcgggacaaagg

SEQ ID NO: 5227 - DNA, 21 bp, synthetic construct
  source 1..21: mol_type = other DNA
  misc_feature 1..21: note = n-mer motif encoding polynucleotide
aaggcggtttcggagattatt

SEQ ID NO: 5228 - DNA, 21 bp, synthetic construct
  source 1..21: mol_type = other DNA
  misc_feature 1..21: note = n-mer motif encoding polynucleotide
accttcacggtcgacggtaga

SEQ ID NO: 5229 - DNA, 21 bp, synthetic construct
  source 1..21: mol_type = other DNA
  misc_feature 1..21: note = n-mer motif encoding polynucleotide
agtacgagtggttataatact

SEQ ID NO: 5230 - DNA, 21 bp, synthetic construct
  misc_feature 1..21: note = n-mer motif encoding polynucleotide
  source 1..21: mol_type = other DNA
aatcatagtctgtcggagcat

SEQ ID NO: 5231 - DNA, 21 bp, synthetic construct
  source 1..21: mol_type = other DNA
  misc_feature 1..21: note = n-mer motif encoding polynucleotide
tctatgcaggatccttctttg

SEQ ID NO: 5232 - DNA, 21 bp, synthetic construct
  misc_feature 1..21: note = n-mer motif encoding polynucleotide
  source 1..21: mol_type = other DNA
gaacaacaaaaaacagacaac

SEQ ID NO: 5233 - DNA, 21 bp, synthetic construct
  misc_feature 1..21: note = n-mer motif encoding polynucleotide
  source 1..21: mol_type = other DNA
gctgttgtgaatgagaatatg

SEQ ID NO: 5234 - DNA, 21 bp, synthetic construct
  source 1..21: mol_type = other DNA
  misc_feature 1..21: note = n-mer motif encoding polynucleotide
ggtcccggagaaaactaccga

SEQ ID NO: 5235 - DNA, 21 bp, synthetic construct
  misc_feature 1..21: note = n-mer motif encoding polynucleotide
  source 1..21: mol_type = other DNA
tacaacgcaggcggagaacaa

SEQ ID NO: 5236 - DNA, 21 bp, synthetic construct
  source 1..21: mol_type = other DNA
  misc_feature 1..21: note = n-mer motif encoding polynucleotide
gtcctctcctccaacctgtac

SEQ ID NO: 5237 - DNA, 21 bp, synthetic construct
  misc_feature 1..21: note = n-mer motif encoding polynucleotide
  source 1..21: mol_type = other DNA
ggtctttatcagaatcctacg

SEQ ID NO: 5238 - DNA, 21 bp, synthetic construct
  misc_feature 1..21: note = n-mer motif encoding polynucleotide
  source 1..21: mol_type = other DNA
agttcggggagtttgattact

SEQ ID NO: 5239 - DNA, 21 bp, synthetic construct
  source 1..21: mol_type = other DNA
  misc_feature 1..21: note = n-mer motif encoding polynucleotide
tataatacggatcggactaat

SEQ ID NO: 5240 - DNA, 21 bp, synthetic construct
  source 1..21: mol_type = other DNA
  misc_feature 1..21: note = n-mer motif encoding polynucleotide
gagaagcctcagcataatagt

SEQ ID NO: 5241 - DNA, 21 bp, synthetic construct
  misc_feature 1..21: note = n-mer motif encoding polynucleotide
  source 1..21: mol_type = other DNA
gcggcttatgagcatgcgcct

SEQ ID NO: 5242 - DNA, 21 bp, synthetic construct
  source 1..21: mol_type = other DNA
  misc_feature 1..21: note = n-mer motif encoding polynucleotide
ggcggcaactacaacacaact

SEQ ID NO: 5243 - DNA, 21 bp, synthetic construct
  misc_feature 1..21: note = n-mer motif encoding polynucleotide
  source 1..21: mol_type = other DNA
tatctgaatagtacgcagatt

SEQ ID NO: 5244 - DNA, 21 bp, synthetic construct
  source 1..21: mol_type = other DNA
  misc_feature 1..21: note = n-mer motif encoding polynucleotide
tctaattctaatactgctgct

SEQ ID NO: 5245 - DNA, 21 bp, synthetic construct
  source 1..21: mol_type = other DNA
  misc_feature 1..21: note = n-mer motif encoding polynucleotide
tcggataataggaatactgcg

SEQ ID NO: 5246 - DNA, 21 bp, synthetic construct
  misc_feature 1..21: note = n-mer motif encoding polynucleotide
  source 1..21: mol_type = other DNA
cgctcgttggacagcgggatg

SEQ ID NO: 5247 - DNA, 21 bp, synthetic construct
  source 1..21: mol_type = other DNA
  misc_feature 1..21: note = n-mer motif encoding polynucleotide
gttatggatacgcatgggatg

SEQ ID NO: 5248 - DNA, 21 bp, synthetic construct
  misc_feature 1..21: note = n-mer motif encoding polynucleotide
  source 1..21: mol_type = other DNA
catgttacggcggtggttgat

SEQ ID NO: 5249 - DNA, 21 bp, synthetic construct
  source 1..21: mol_type = other DNA
  misc_feature 1..21: note = n-mer motif encoding polynucleotide
agtatcacccacagcaacacc

SEQ ID NO: 5250 - DNA, 21 bp, synthetic construct
  misc_feature 1..21: note = n-mer motif encoding polynucleotide
  source 1..21: mol_type = other DNA
ggatacggcagttacagcaac

SEQ ID NO: 5251 - DNA, 21 bp, synthetic construct
  source 1..21: mol_type = other DNA
  misc_feature 1..21: note = n-mer motif encoding polynucleotide
cgttggtctgaaaacaactcc

SEQ ID NO: 5252 - DNA, 21 bp, synthetic construct
  misc_feature 1..21: note = n-mer motif encoding polynucleotide
  source 1..21: mol_type = other DNA
atgtctagccacaccgtccaa

SEQ ID NO: 5253 - DNA, 21 bp, synthetic construct
  source 1..21: mol_type = other DNA
  misc_feature 1..21: note = n-mer motif encoding polynucleotide
tatgttagggcgcaggatcag

SEQ ID NO: 5254 - DNA, 21 bp, synthetic construct
  misc_feature 1..21: note = n-mer motif encoding polynucleotide
  source 1..21: mol_type = other DNA
tttgagggtgataagacttat

SEQ ID NO: 5255 - DNA, 21 bp, synthetic construct
  source 1..21: mol_type = other DNA
  misc_feature 1..21: note = n-mer motif encoding polynucleotide
gttagctccggccacacgaaa

SEQ ID NO: 5256 - DNA, 21 bp, synthetic construct
  misc_feature 1..21: note = n-mer motif encoding polynucleotide
  source 1..21: mol_type = other DNA
tcgatgaacctgccaacttca

SEQ ID NO: 5257 - DNA, 21 bp, synthetic construct
  misc_feature 1..21: note = n-mer motif encoding polynucleotide
  source 1..21: mol_type = other DNA
ctgaatcctcagcatgagttg

SEQ ID NO: 5258 - DNA, 21 bp, synthetic construct
  source 1..21: mol_type = other DNA
  misc_feature 1..21: note = n-mer motif encoding polynucleotide
cttccgcctgcgtcggcgggt

SEQ ID NO: 5259 - DNA, 21 bp, synthetic construct
  source 1..21: mol_type = other DNA
  misc_feature 1..21: note = n-mer motif encoding polynucleotide
ggagggaactcccacggggta

SEQ ID NO: 5260 - DNA, 21 bp, synthetic construct
  source 1..21: mol_type = other DNA
  misc_feature 1..21: note = n-mer motif encoding polynucleotide
gggggtacggggttgtcgaag

SEQ ID NO: 5261 - DNA, 21 bp, synthetic construct
  source 1..21: mol_type = other DNA
  misc_feature 1..21: note = n-mer motif encoding polynucleotide
agtttgaattcttcgagtact

SEQ ID NO: 5262 - DNA, 21 bp, synthetic construct
  source 1..21: mol_type = other DNA
  misc_feature 1..21: note = n-mer motif encoding polynucleotide
atgcctagtgaaccaccaggg

SEQ ID NO: 5263 - DNA, 21 bp, synthetic construct
  source 1..21: mol_type = other DNA
  misc_feature 1..21: note = n-mer motif encoding polynucleotide
gttgtgcattcgagtattact

SEQ ID NO: 5264 - DNA, 21 bp, synthetic construct
  source 1..21: mol_type = other DNA
  misc_feature 1..21: note = n-mer motif encoding polynucleotide
ttgagtctggctgggaatagg

SEQ ID NO: 5265 - DNA, 21 bp, synthetic construct
  source 1..21: mol_type = other DNA
  misc_feature 1..21: note = n-mer motif encoding polynucleotide
gcggacatgcaacacaccgta

SEQ ID NO: 5266 - DNA, 21 bp, synthetic construct
  source 1..21: mol_type = other DNA
  misc_feature 1..21: note = n-mer motif encoding polynucleotide
tttcgtgatggtcagggtatg

SEQ ID NO: 5267 - DNA, 21 bp, synthetic construct
  source 1..21: mol_type = other DNA
  misc_feature 1..21: note = n-mer motif encoding polynucleotide
accggaacagcgatctcccga

SEQ ID NO: 5268 - DNA, 21 bp, synthetic construct
  misc_feature 1..21: note = n-mer motif encoding polynucleotide
  source 1..21: mol_type = other DNA
atggggaagcatgagggtctt

SEQ ID NO: 5269 - DNA, 21 bp, synthetic construct
  misc_feature 1..21: note = n-mer motif encoding polynucleotide
  source 1..21: mol_type = other DNA
ccggaatccgccgccaaaagc

SEQ ID NO: 5270 - DNA, 21 bp, synthetic construct
  source 1..21: mol_type = other DNA
  misc_feature 1..21: note = n-mer motif encoding polynucleotide
acccaagccttctccctaggc

SEQ ID NO: 5271 - DNA, 21 bp, synthetic construct
  misc_feature 1..21: note = n-mer motif encoding polynucleotide
  source 1..21: mol_type = other DNA
actgatggtatttttcagcct

SEQ ID NO: 5272 - DNA, 21 bp, synthetic construct
  source 1..21: mol_type = other DNA
  misc_feature 1..21: note = n-mer motif encoding polynucleotide
gggagcccagtgatagtaaac

SEQ ID NO: 5273 - DNA, 21 bp, synthetic construct
  source 1..21: mol_type = other DNA
  misc_feature 1..21: note = n-mer motif encoding polynucleotide
gggcgtgataatcatcatgcg

SEQ ID NO: 5274 - DNA, 21 bp, synthetic construct
  misc_feature 1..21: note = n-mer motif encoding polynucleotide
  source 1..21: mol_type = other DNA
ccgcgttctattacggagttg

SEQ ID NO: 5275 - DNA, 21 bp, synthetic construct
  source 1..21: mol_type = other DNA
  misc_feature 1..21: note = n-mer motif encoding polynucleotide
tgggtaaacagtgtgggcaac

SEQ ID NO: 5276 - DNA, 21 bp, synthetic construct
  source 1..21: mol_type = other DNA
  misc_feature 1..21: note = n-mer motif encoding polynucleotide
gttcatgggacgttgacttat

SEQ ID NO: 5277 - DNA, 21 bp, synthetic construct
  source 1..21: mol_type = other DNA
  misc_feature 1..21: note = n-mer motif encoding polynucleotide
ggtgtgtatattgatggtcgg

SEQ ID NO: 5278 - DNA, 21 bp, synthetic construct
  misc_feature 1..21: note = n-mer motif encoding polynucleotide
  source 1..21: mol_type = other DNA
atgagtaatgatttgcctggg

SEQ ID NO: 5279 - DNA, 21 bp, synthetic construct
  misc_feature 1..21: note = n-mer motif encoding polynucleotide
  source 1..21: mol_type = other DNA
aatcggtcggatagttttgcg

SEQ ID NO: 5280 - DNA, 21 bp, synthetic construct
  misc_feature 1..21: note = n-mer motif encoding polynucleotide
  source 1..21: mol_type = other DNA
gggcaaacaaacgcagtacac

SEQ ID NO: 5281 - DNA, 21 bp, synthetic construct
  misc_feature 1..21: note = n-mer motif encoding polynucleotide
  source 1..21: mol_type = other DNA
tacgtcgacaaatcaatgaca

SEQ ID NO: 5282 - DNA, 21 bp, synthetic construct
  source 1..21: mol_type = other DNA
  misc_feature 1..21: note = n-mer motif encoding polynucleotide
agtgtgatggtgggtacgaat

SEQ ID NO: 5283 - DNA, 21 bp, synthetic construct
  misc_feature 1..21: note = n-mer motif encoding polynucleotide
  source 1..21: mol_type = other DNA
attggtctgcagaattctact

SEQ ID NO: 5284 - DNA, 21 bp, synthetic construct
  source 1..21: mol_type = other DNA
  misc_feature 1..21: note = n-mer motif encoding polynucleotide
aacgaccgaccgcttgccagc

SEQ ID NO: 5285 - DNA, 21 bp, synthetic construct
  source 1..21: mol_type = other DNA
  misc_feature 1..21: note = n-mer motif encoding polynucleotide
ctcatgggcagtccaggcgcg

SEQ ID NO: 5286 - DNA, 21 bp, synthetic construct
  misc_feature 1..21: note = n-mer motif encoding polynucleotide
  source 1..21: mol_type = other DNA
attgatcgtagtgctagtttg

SEQ ID NO: 5287 - DNA, 21 bp, synthetic construct
  source 1..21: mol_type = other DNA
  misc_feature 1..21: note = n-mer motif encoding polynucleotide
attcaggcgaagaattctgag

SEQ ID NO: 5288 - DNA, 21 bp, synthetic construct
  source 1..21: mol_type = other DNA
  misc_feature 1..21: note = n-mer motif encoding polynucleotide
catcagtcttttgatgctggt

SEQ ID NO: 5289 - DNA, 21 bp, synthetic construct
  source 1..21: mol_type = other DNA
  misc_feature 1..21: note = n-mer motif encoding polynucleotide
gcggttaatgagactaggctt

SEQ ID NO: 5290 - DNA, 21 bp, synthetic construct
  source 1..21: mol_type = other DNA
  misc_feature 1..21: note = n-mer motif encoding polynucleotide
atcgcgtcaacgtggaacatg

SEQ ID NO: 5291 - DNA, 21 bp, synthetic construct
  misc_feature 1..21: note = n-mer motif encoding polynucleotide
  source 1..21: mol_type = other DNA
aaagtggacatgacctccaaa

SEQ ID NO: 5292 - DNA, 21 bp, synthetic construct
  misc_feature 1..21: note = n-mer motif encoding polynucleotide
  source 1..21: mol_type = other DNA
tctcatagtattacgggtctt

SEQ ID NO: 5293 - DNA, 21 bp, synthetic construct
  source 1..21: mol_type = other DNA
  misc_feature 1..21: note = n-mer motif encoding polynucleotide
actattactagtccgtcggtg

SEQ ID NO: 5294 - DNA, 21 bp, synthetic construct
  misc_feature 1..21: note = n-mer motif encoding polynucleotide
  source 1..21: mol_type = other DNA
gaacacatctctagctacgga

SEQ ID NO: 5295 - DNA, 21 bp, synthetic construct
  misc_feature 1..21: note = n-mer motif encoding polynucleotide
  source 1..21: mol_type = other DNA
ttctcaacaaactctgtaatc

SEQ ID NO: 5296 - DNA, 21 bp, synthetic construct
  misc_feature 1..21: note = n-mer motif encoding polynucleotide
  source 1..21: mol_type = other DNA
tcgatggagggtcagcagcat

SEQ ID NO: 5297 - DNA, 21 bp, synthetic construct
  source 1..21: mol_type = other DNA
  misc_feature 1..21: note = n-mer motif encoding polynucleotide
gtcgacaaaagcgaagccgtc

SEQ ID NO: 5298 - DNA, 21 bp, synthetic construct
  misc_feature 1..21: note = n-mer motif encoding polynucleotide
  source 1..21: mol_type = other DNA
caagctaacttatcaataatc

SEQ ID NO: 5299 - DNA, 21 bp, synthetic construct
  misc_feature 1..21: note = n-mer motif encoding polynucleotide
  source 1..21: mol_type = other DNA
gttaaggcgagtgctggggtt

SEQ ID NO: 5300 - DNA, 21 bp, synthetic construct
  source 1..21: mol_type = other DNA
  misc_feature 1..21: note = n-mer motif encoding polynucleotide
tttggtacttcttatacgact

SEQ ID NO: 5301 - DNA, 21 bp, synthetic construct
  source 1..21: mol_type = other DNA
  misc_feature 1..21: note = n-mer motif encoding polynucleotide
gggctcacaggatacccaatg

SEQ ID NO: 5302 - DNA, 21 bp, synthetic construct
  source 1..21: mol_type = other DNA
  misc_feature 1..21: note = n-mer motif encoding polynucleotide
gctatgggagcactcgtgcac

SEQ ID NO: 5303 - DNA, 21 bp, synthetic construct
  source 1..21: mol_type = other DNA
  misc_feature 1..21: note = n-mer motif encoding polynucleotide
gtatacgccaccgcactcgca

SEQ ID NO: 5304 - DNA, 21 bp, synthetic construct
  source 1..21: mol_type = other DNA
  misc_feature 1..21: note = n-mer motif encoding polynucleotide
acattaacagacgttcaccga

SEQ ID NO: 5305 - DNA, 21 bp, synthetic construct
  misc_feature 1..21: note = n-mer motif encoding polynucleotide
  source 1..21: mol_type = other DNA
ccatcctcagcgggtagcaca

SEQ ID NO: 5306 - DNA, 21 bp, synthetic construct
  misc_feature 1..21: note = n-mer motif encoding polynucleotide
  source 1..21: mol_type = other DNA
aaaaaacgaaaacactaacta

SEQ ID NO: 5307 - DNA, 21 bp, synthetic construct
  misc_feature 1..21: note = n-mer motif encoding polynucleotide
  source 1..21: mol_type = other DNA
gcttatcagctgactccggct

SEQ ID NO: 5308 - DNA, 21 bp, synthetic construct
  misc_feature 1..21: note = n-mer motif encoding polynucleotide
  source 1..21: mol_type = other DNA
cttgcgcctgataatattggg

SEQ ID NO: 5309 - DNA, 21 bp, synthetic construct
  misc_feature 1..21: note = n-mer motif encoding polynucleotide
  source 1..21: mol_type = other DNA
acaatcgtttccgcttacgcc

SEQ ID NO: 5310 - DNA, 21 bp, synthetic construct
  source 1..21: mol_type = other DNA
  misc_feature 1..21: note = n-mer motif encoding polynucleotide
ggtaataatttgagtttgtct

SEQ ID NO: 5311 - DNA, 21 bp, synthetic construct
  misc_feature 1..21: note = n-mer motif encoding polynucleotide
  source 1..21: mol_type = other DNA
agcacaaacaccgaacctagg

SEQ ID NO: 5312 - DNA, 21 bp, synthetic construct
  misc_feature 1..21: note = n-mer motif encoding polynucleotide
  source 1..21: mol_type = other DNA
tcttttcagacggatcgtgcg

SEQ ID NO: 5313 - DNA, 21 bp, synthetic construct
  misc_feature 1..21: note = n-mer motif encoding polynucleotide
  source 1..21: mol_type = other DNA
ttcttagaaggagtcgctcaa

SEQ ID NO: 5314 - DNA, 21 bp, synthetic construct
  misc_feature 1..21: note = n-mer motif encoding polynucleotide
  source 1..21: mol_type = other DNA
caagacgtaggacgcacgaac

SEQ ID NO: 5315 - DNA, 21 bp, synthetic construct
  misc_feature 1..21: note = n-mer motif encoding polynucleotide
  source 1..21: mol_type = other DNA
acgcatggtgatcatattcag

SEQ ID NO: 5316 - DNA, 21 bp, synthetic construct
  source 1..21: mol_type = other DNA
  misc_feature 1..21: note = n-mer motif encoding polynucleotide
gtatcagaaggacaacgaatc

SEQ ID NO: 5317 - DNA, 21 bp, synthetic construct
  source 1..21: mol_type = other DNA
  misc_feature 1..21: note = n-mer motif encoding polynucleotide
aacatgggtccaatgggccgg

SEQ ID NO: 5318 - DNA, 21 bp, synthetic construct
  source 1..21: mol_type = other DNA
  misc_feature 1..21: note = n-mer motif encoding polynucleotide
ctaccctcaacagaaactttg

SEQ ID NO: 5319 - DNA, 21 bp, synthetic construct
  misc_feature 1..21: note = n-mer motif encoding polynucleotide
  source 1..21: mol_type = other DNA
ggtggtatgtcggcgcattcg

SEQ ID NO: 5320 - DNA, 21 bp, synthetic construct
  source 1..21: mol_type = other DNA
  misc_feature 1..21: note = n-mer motif encoding polynucleotide
gggatgatcgggcacaacgca

SEQ ID NO: 5321 - DNA, 21 bp, synthetic construct
  source 1..21: mol_type = other DNA
  misc_feature 1..21: note = n-mer motif encoding polynucleotide
atagacgaacgttcctcgata

SEQ ID NO: 5322 - DNA, 21 bp, synthetic construct
  source 1..21: mol_type = other DNA
  misc_feature 1..21: note = n-mer motif encoding polynucleotide
catgtgaatcctacgccggcg

SEQ ID NO: 5323 - DNA, 21 bp, synthetic construct
  misc_feature 1..21: note = n-mer motif encoding polynucleotide
  source 1..21: mol_type = other DNA
tggtcgagaactggaaacacc

SEQ ID NO: 5324 - DNA, 21 bp, synthetic construct
  source 1..21: mol_type = other DNA
  misc_feature 1..21: note = n-mer motif encoding polynucleotide
atcaaagactcgtaccttact

SEQ ID NO: 5325 - DNA, 21 bp, synthetic construct
  misc_feature 1..21: note = n-mer motif encoding polynucleotide
  source 1..21: mol_type = other DNA
ttgaaccaaaacagtgtctcc

SEQ ID NO: 5326 - DNA, 21 bp, synthetic construct
  misc_feature 1..21: note = n-mer motif encoding polynucleotide
  source 1..21: mol_type = other DNA
tctggtccgattcctgctgtt

SEQ ID NO: 5327 - DNA, 21 bp, synthetic construct
  source 1..21: mol_type = other DNA
  misc_feature 1..21: note = n-mer motif encoding polynucleotide
atgcaagggcttaacaacatg

SEQ ID NO: 5328 - DNA, 21 bp, synthetic construct
  misc_feature 1..21: note = n-mer motif encoding polynucleotide
  source 1..21: mol_type = other DNA
tcaaacagcggaggcaaccac

SEQ ID NO: 5329 - DNA, 21 bp, synthetic construct
  source 1..21: mol_type = other DNA
  misc_feature 1..21: note = n-mer motif encoding polynucleotide
acgagtacgatgactgcgcgt

SEQ ID NO: 5330 - DNA, 21 bp, synthetic construct
  misc_feature 1..21: note = n-mer motif encoding polynucleotide
  source 1..21: mol_type = other DNA
gagaatagtgatttgtcttat

SEQ ID NO: 5331 - DNA, 21 bp, synthetic construct
  source 1..21: mol_type = other DNA
  misc_feature 1..21: note = n-mer motif encoding polynucleotide
catcctgggaatagttctgtg

SEQ ID NO: 5332 - DNA, 21 bp, synthetic construct
  misc_feature 1..21: note = n-mer motif encoding polynucleotide
  source 1..21: mol_type = other DNA
ttaacaccccaagggactagt

SEQ ID NO: 5333 - DNA, 21 bp, synthetic construct
  source 1..21: mol_type = other DNA
  misc_feature 1..21: note = n-mer motif encoding polynucleotide
accgacacccgaaaaaacgac

SEQ ID NO: 5334 - DNA, 21 bp, synthetic construct
  misc_feature 1..21: note = n-mer motif encoding polynucleotide
  source 1..21: mol_type = other DNA
ggggagacgctgaggtctcag

SEQ ID NO: 5335 - DNA, 21 bp, synthetic construct
  misc_feature 1..21: note = n-mer motif encoding polynucleotide
  source 1..21: mol_type = other DNA
agcggtgtatcagaaggaaac

SEQ ID NO: 5336 - DNA, 21 bp, synthetic construct
  misc_feature 1..21: note = n-mer motif encoding polynucleotide
  source 1..21: mol_type = other DNA
actcagtatggtactctgccg

SEQ ID NO: 5337 - DNA, 21 bp, synthetic construct
  misc_feature 1..21: note = n-mer motif encoding polynucleotide
  source 1..21: mol_type = other DNA
gggacggttaactcaagtgca

SEQ ID NO: 5338 - DNA, 21 bp, synthetic construct
  source 1..21: mol_type = other DNA
  misc_feature 1..21: note = n-mer motif encoding polynucleotide
ggtaaagcaaccttagtcctc

SEQ ID NO: 5339 - DNA, 21 bp, synthetic construct
  source 1..21: mol_type = other DNA
  misc_feature 1..21: note = n-mer motif encoding polynucleotide
ggtatatacccggcatccacc

SEQ ID NO: 5340 - DNA, 21 bp, synthetic construct
  misc_feature 1..21: note = n-mer motif encoding polynucleotide
  source 1..21: mol_type = other DNA
ggtgttatgtctaatgctact

SEQ ID NO: 5341 - DNA, 21 bp, synthetic construct
  source 1..21: mol_type = other DNA
  misc_feature 1..21: note = n-mer motif encoding polynucleotide
actcatgtgattggggctgtg

SEQ ID NO: 5342 - DNA, 21 bp, synthetic construct
  source 1..21: mol_type = other DNA
  misc_feature 1..21: note = n-mer motif encoding polynucleotide
actcggagtgatattggtgtg

SEQ ID NO: 5343 - DNA, 21 bp, synthetic construct
  misc_feature 1..21: note = n-mer motif encoding polynucleotide
  source 1..21: mol_type = other DNA
acgcttacattatctaccctc

SEQ ID NO: 5344 - DNA, 21 bp, synthetic construct
  source 1..21: mol_type = other DNA
  misc_feature 1..21: note = n-mer motif encoding polynucleotide
tataatgagtcttcgaatgcg

SEQ ID NO: 5345 - DNA, 21 bp, synthetic construct
  source 1..21: mol_type = other DNA
  misc_feature 1..21: note = n-mer motif encoding polynucleotide
tcgacgcaggcgcagaccggc

SEQ ID NO: 5346 - DNA, 21 bp, synthetic construct
  source 1..21: mol_type = other DNA
  misc_feature 1..21: note = n-mer motif encoding polynucleotide
cgcgacatgatcaactcatca

SEQ ID NO: 5347 - DNA, 21 bp, synthetic construct
  misc_feature 1..21: note = n-mer motif encoding polynucleotide
  source 1..21: mol_type = other DNA
actaagggtaataatctggtt

SEQ ID NO: 5348 - DNA, 21 bp, synthetic construct
  source 1..21: mol_type = other DNA
  misc_feature 1..21: note = n-mer motif encoding polynucleotide
ggttctacggtgtcggcgcag

SEQ ID NO: 5349 - DNA, 21 bp, synthetic construct
  source 1..21: mol_type = other DNA
  misc_feature 1..21: note = n-mer motif encoding polynucleotide
aggggtgatactatgaattat

SEQ ID NO: 5350 - DNA, 21 bp, synthetic construct
  misc_feature 1..21: note = n-mer motif encoding polynucleotide
  source 1..21: mol_type = other DNA
catgcggatgtgaatgctggg

SEQ ID NO: 5351 - DNA, 21 bp, synthetic construct
  source 1..21: mol_type = other DNA
  misc_feature 1..21: note = n-mer motif encoding polynucleotide
agcgttgtcaacaccaacatc

SEQ ID NO: 5352 - DNA, 21 bp, synthetic construct
  source 1..21: mol_type = other DNA
  misc_feature 1..21: note = n-mer motif encoding polynucleotide
tctaatgttcatgttgttaat

SEQ ID NO: 5353 - DNA, 21 bp, synthetic construct
  source 1..21: mol_type = other DNA
  misc_feature 1..21: note = n-mer motif encoding polynucleotide
tcggttgataagccgccgggg

SEQ ID NO: 5354 - DNA, 21 bp, synthetic construct
  misc_feature 1..21: note = n-mer motif encoding polynucleotide
  source 1..21: mol_type = other DNA
gaccgcacctactcaaacaca

SEQ ID NO: 5355 - DNA, 21 bp, synthetic construct
  source 1..21: mol_type = other DNA
  misc_feature 1..21: note = n-mer motif encoding polynucleotide
tactccggagaactaaacaaa

SEQ ID NO: 5356 - DNA, 21 bp, synthetic construct
  misc_feature 1..21: note = n-mer motif encoding polynucleotide
  source 1..21: mol_type = other DNA
tatgataagactttgagtgtt

SEQ ID NO: 5357 - DNA, 21 bp, synthetic construct
  source 1..21: mol_type = other DNA
  misc_feature 1..21: note = n-mer motif encoding polynucleotide
cacaccgccacccttagcagc

SEQ ID NO: 5358 - DNA, 21 bp, synthetic construct
  source 1..21: mol_type = other DNA
  misc_feature 1..21: note = n-mer motif encoding polynucleotide
gctctggagagggctcagtat

SEQ ID NO: 5359 - DNA, 21 bp, synthetic construct
  misc_feature 1..21: note = n-mer motif encoding polynucleotide
  source 1..21: mol_type = other DNA
ggtacgagtgataattatagg

SEQ ID NO: 5360 - DNA, 21 bp, synthetic construct
  source 1..21: mol_type = other DNA
  misc_feature 1..21: note = n-mer motif encoding polynucleotide
catgtgaatagtagggatctt

SEQ ID NO: 5361 - DNA, 21 bp, synthetic construct
  source 1..21: mol_type = other DNA
  misc_feature 1..21: note = n-mer motif encoding polynucleotide
tcgtcagacgttaccagacaa

SEQ ID NO: 5362 - DNA, 21 bp, synthetic construct
  source 1..21: mol_type = other DNA
  misc_feature 1..21: note = n-mer motif encoding polynucleotide
gctcatcatatgacgacggag

SEQ ID NO: 5363 - DNA, 21 bp, synthetic construct
  misc_feature 1..21: note = n-mer motif encoding polynucleotide
  source 1..21: mol_type = other DNA
gaggtgtctagggatggtctg

SEQ ID NO: 5364 - DNA, 21 bp, synthetic construct
  misc_feature 1..21: note = n-mer motif encoding polynucleotide
  source 1..21: mol_type = other DNA
gtgggccgtgacgcagaagct

SEQ ID NO: 5365 - DNA, 21 bp, synthetic construct
  misc_feature 1..21: note = n-mer motif encoding polynucleotide
  source 1..21: mol_type = other DNA
gcacaccaaaaagacctacgc

SEQ ID NO: 5366 - DNA, 21 bp, synthetic construct
  source 1..21: mol_type = other DNA
  misc_feature 1..21: note = n-mer motif encoding polynucleotide
agtgttctgagtagttcgact

SEQ ID NO: 5367 - DNA, 21 bp, synthetic construct
  source 1..21: mol_type = other DNA
  misc_feature 1..21: note = n-mer motif encoding polynucleotide
ctgggtacgctgcttagtcag

SEQ ID NO: 5368 - DNA, 21 bp, synthetic construct
  misc_feature 1..21: note = n-mer motif encoding polynucleotide
  source 1..21: mol_type = other DNA
tcacaaaaaccaatcgacgac

SEQ ID NO: 5369 - DNA, 21 bp, synthetic construct
  misc_feature 1..21: note = n-mer motif encoding polynucleotide
  source 1..21: mol_type = other DNA
gataatgtgcatgggcaggtg

SEQ ID NO: 5370 - DNA, 21 bp, synthetic construct
  misc_feature 1..21: note = n-mer motif encoding polynucleotide
  source 1..21: mol_type = other DNA
ggttcgcacaacgggccgaca

SEQ ID NO: 5371 - DNA, 21 bp, synthetic construct
  source 1..21: mol_type = other DNA
  misc_feature 1..21: note = n-mer motif encoding polynucleotide
atctccggtagtagcagtcta

SEQ ID NO: 5372 - DNA, 21 bp, synthetic construct
  misc_feature 1..21: note = n-mer motif encoding polynucleotide
  source 1..21: mol_type = other DNA
ggttttcatattaatggtgag

SEQ ID NO: 5373 - DNA, 21 bp, synthetic construct
  misc_feature 1..21: note = n-mer motif encoding polynucleotide
  source 1..21: mol_type = other DNA
atgagtgatgggcattcgaag

SEQ ID NO: 5374 - DNA, 21 bp, synthetic construct
  source 1..21: mol_type = other DNA
  misc_feature 1..21: note = n-mer motif encoding polynucleotide
actgttggtggtaatcatcat

SEQ ID NO: 5375 - DNA, 21 bp, synthetic construct
  source 1..21: mol_type = other DNA
  misc_feature 1..21: note = n-mer motif encoding polynucleotide
aatgctactccgccgaatcat

SEQ ID NO: 5376 - DNA, 21 bp, synthetic construct
  source 1..21: mol_type = other DNA
  misc_feature 1..21: note = n-mer motif encoding polynucleotide
acgggtatgaatagtaataag

SEQ ID NO: 5377 - DNA, 21 bp, synthetic construct
  misc_feature 1..21: note = n-mer motif encoding polynucleotide
  source 1..21: mol_type = other DNA
atcgaagcctactcacgagac

SEQ ID NO: 5378 - DNA, 21 bp, synthetic construct
  source 1..21: mol_type = other DNA
  misc_feature 1..21: note = n-mer motif encoding polynucleotide
cgcgaccgtcaagactcggta

SEQ ID NO: 5379 - DNA, 21 bp, synthetic construct
  misc_feature 1..21: note = n-mer motif encoding polynucleotide
  source 1..21: mol_type = other DNA
cacacggttcaaatacgcgaa

SEQ ID NO: 5380 - DNA, 21 bp, synthetic construct
  misc_feature 1..21: note = n-mer motif encoding polynucleotide
  source 1..21: mol_type = other DNA
actttgacgcagactgggatg

SEQ ID NO: 5381 - DNA, 21 bp, synthetic construct
  misc_feature 1..21: note = n-mer motif encoding polynucleotide
  source 1..21: mol_type = other DNA
attaataattttaatactctg

SEQ ID NO: 5382 - DNA, 21 bp, synthetic construct
  misc_feature 1..21: note = n-mer motif encoding polynucleotide
  source 1..21: mol_type = other DNA
gtagccgcgggaccagaagcg

SEQ ID NO: 5383 - DNA, 21 bp, synthetic construct
  misc_feature 1..21: note = n-mer motif encoding polynucleotide
  source 1..21: mol_type = other DNA
gatggtaagaatagttatgcg

SEQ ID NO: 5384 - DNA, 21 bp, synthetic construct
  source 1..21: mol_type = other DNA
  misc_feature 1..21: note = n-mer motif encoding polynucleotide
tccaggcaagaaaacttctcc

SEQ ID NO: 5385 - DNA, 21 bp, synthetic construct
  source 1..21: mol_type = other DNA
  misc_feature 1..21: note = n-mer motif encoding polynucleotide
tctaacagcagtgttgcggta

SEQ ID NO: 5386 - DNA, 21 bp, synthetic construct
  misc_feature 1..21: note = n-mer motif encoding polynucleotide
  source 1..21: mol_type = other DNA
gatcatagtaagcagagttcg

SEQ ID NO: 5387 - DNA, 21 bp, synthetic construct
  source 1..21: mol_type = other DNA
  misc_feature 1..21: note = n-mer motif encoding polynucleotide
ttgagtggtgctggtagtcag

SEQ ID NO: 5388 - DNA, 21 bp, synthetic construct
  misc_feature 1..21: note = n-mer motif encoding polynucleotide
  source 1..21: mol_type = other DNA
ggttggagtaataatgagttg

SEQ ID NO: 5389 - DNA, 21 bp, synthetic construct
  source 1..21: mol_type = other DNA
  misc_feature 1..21: note = n-mer motif encoding polynucleotide
ctaatacgaggttccatggaa

SEQ ID NO: 5390 - DNA, 21 bp, synthetic construct
  misc_feature 1..21: note = n-mer motif encoding polynucleotide
  source 1..21: mol_type = other DNA
aatacttatactgctggtaag

SEQ ID NO: 5391 - DNA, 21 bp, synthetic construct
  source 1..21: mol_type = other DNA
  misc_feature 1..21: note = n-mer motif encoding polynucleotide
actcgtggcgacatggaattc

SEQ ID NO: 5392 - DNA, 21 bp, synthetic construct
  source 1..21: mol_type = other DNA
  misc_feature 1..21: note = n-mer motif encoding polynucleotide
ctcatgtcagggaaagaaaac

SEQ ID NO: 5393 - DNA, 21 bp, synthetic construct
  source 1..21: mol_type = other DNA
  misc_feature 1..21: note = n-mer motif encoding polynucleotide
aaggatactaatcagcagatt

SEQ ID NO: 5394 - DNA, 21 bp, synthetic construct
  source 1..21: mol_type = other DNA
  misc_feature 1..21: note = n-mer motif encoding polynucleotide
cacaacgtcggcctaggacac

SEQ ID NO: 5395 - DNA, 21 bp, synthetic construct
  source 1..21: mol_type = other DNA
  misc_feature 1..21: note = n-mer motif encoding polynucleotide
cctgatcagcctggtccttct

SEQ ID NO: 5396 - DNA, 21 bp, synthetic construct
  source 1..21: mol_type = other DNA
  misc_feature 1..21: note = n-mer motif encoding polynucleotide
atgcaaagagaagcagccaac

SEQ ID NO: 5397 - DNA, 21 bp, synthetic construct
  source 1..21: mol_type = other DNA
  misc_feature 1..21: note = n-mer motif encoding polynucleotide
gggcagcgtacgacgaatgat

SEQ ID NO: 5398 - DNA, 21 bp, synthetic construct
  misc_feature 1..21: note = n-mer motif encoding polynucleotide
  source 1..21: mol_type = other DNA
aaacacacagaaaacgggacc

SEQ ID NO: 5399 - DNA, 21 bp, synthetic construct
  misc_feature 1..21: note = n-mer motif encoding polynucleotide
  source 1..21: mol_type = other DNA
ttagacgtgacgagaatgaga

SEQ ID NO: 5400 - DNA, 21 bp, synthetic construct
  source 1..21: mol_type = other DNA
  misc_feature 1..21: note = n-mer motif encoding polynucleotide
acgttggatcggaatcagact

SEQ ID NO: 5401 - DNA, 21 bp, synthetic construct
  misc_feature 1..21: note = n-mer motif encoding polynucleotide
  source 1..21: mol_type = other DNA
atcaacgccggcaactaccga

SEQ ID NO: 5402 - DNA, 21 bp, synthetic construct
  misc_feature 1..21: note = n-mer motif encoding polynucleotide
  source 1..21: mol_type = other DNA
gccgtagaccaatcacgtttg

SEQ ID NO: 5403 - DNA, 21 bp, synthetic construct
  source 1..21: mol_type = other DNA
  misc_feature 1..21: note = n-mer motif encoding polynucleotide
gctcttgggcatcaggggaat

SEQ ID NO: 5404 - DNA, 21 bp, synthetic construct
  source 1..21: mol_type = other DNA
  misc_feature 1..21: note = n-mer motif encoding polynucleotide
cttccgcgtcatgatcagtat

SEQ ID NO: 5405 - DNA, 21 bp, synthetic construct
  misc_feature 1..21: note = n-mer motif encoding polynucleotide
  source 1..21: mol_type = other DNA
atttctgggtcgtcgtctctt

SEQ ID NO: 5406 - DNA, 21 bp, synthetic construct
  source 1..21: mol_type = other DNA
  misc_feature 1..21: note = n-mer motif encoding polynucleotide
tggaatacgaatatggcgatt

SEQ ID NO: 5407 - DNA, 21 bp, synthetic construct
  source 1..21: mol_type = other DNA
  misc_feature 1..21: note = n-mer motif encoding polynucleotide
atgtcggatcgtacttctgat

SEQ ID NO: 5408 - DNA, 21 bp, synthetic construct
  misc_feature 1..21: note = n-mer motif encoding polynucleotide
  source 1..21: mol_type = other DNA
acaagggaatcaatgtccatc

SEQ ID NO: 5409 - DNA, 21 bp, synthetic construct
  source 1..21: mol_type = other DNA
  misc_feature 1..21: note = n-mer motif encoding polynucleotide
cagcggggggagcttcctgcg

SEQ ID NO: 5410 - DNA, 21 bp, synthetic construct
  misc_feature 1..21: note = n-mer motif encoding polynucleotide
  source 1..21: mol_type = other DNA
tcgtctgatcctaaggggcag

SEQ ID NO: 5411 - DNA, 21 bp, synthetic construct
  misc_feature 1..21: note = n-mer motif encoding polynucleotide
  source 1..21: mol_type = other DNA
ccgagtgataggactacttat

SEQ ID NO: 5412 - DNA, 21 bp, synthetic construct
  misc_feature 1..21: note = n-mer motif encoding polynucleotide
  source 1..21: mol_type = other DNA
tcttcttctgatagtccgcgt

SEQ ID NO: 5413 - DNA, 21 bp, synthetic construct
  source 1..21: mol_type = other DNA
  misc_feature 1..21: note = n-mer motif encoding polynucleotide
gtattacactctgtatcagca

SEQ ID NO: 5414 - DNA, 21 bp, synthetic construct
  misc_feature 1..21: note = n-mer motif encoding polynucleotide
  source 1..21: mol_type = other DNA
agtatgcaatcatacaccatg

SEQ ID NO: 5415 - DNA, 21 bp, synthetic construct
  source 1..21: mol_type = other DNA
  misc_feature 1..21: note = n-mer motif encoding polynucleotide
tctctgcaactcacagcgggt

SEQ ID NO: 5416 - DNA, 21 bp, synthetic construct
  misc_feature 1..21: note = n-mer motif encoding polynucleotide
  source 1..21: mol_type = other DNA
aacaacgtaaacccgtactcg

SEQ ID NO: 5417 - DNA, 21 bp, synthetic construct
  source 1..21: mol_type = other DNA
  misc_feature 1..21: note = n-mer motif encoding polynucleotide
cttgcgaatggtatgacggct

SEQ ID NO: 5418 - DNA, 21 bp, synthetic construct
  misc_feature 1..21: note = n-mer motif encoding polynucleotide
  source 1..21: mol_type = other DNA
ggaatcacaggatcaacagga

SEQ ID NO: 5419 - DNA, 21 bp, synthetic construct
  source 1..21: mol_type = other DNA
  misc_feature 1..21: note = n-mer motif encoding polynucleotide
atgcttgttcagaatactcct

SEQ ID NO: 5420 - DNA, 21 bp, synthetic construct
  source 1..21: mol_type = other DNA
  misc_feature 1..21: note = n-mer motif encoding polynucleotide
gatgcgaatgcgggtacgagg

SEQ ID NO: 5421 - DNA, 21 bp, synthetic construct
  misc_feature 1..21: note = n-mer motif encoding polynucleotide
  source 1..21: mol_type = other DNA
gaaaccggagctatgacctct

SEQ ID NO: 5422 - DNA, 21 bp, synthetic construct
  source 1..21: mol_type = other DNA
  misc_feature 1..21: note = n-mer motif encoding polynucleotide
atacaaactactacaaaatgc

SEQ ID NO: 5423 - DNA, 21 bp, synthetic construct
  misc_feature 1..21: note = n-mer motif encoding polynucleotide
  source 1..21: mol_type = other DNA
gcgcagcagagtcttcatggt

SEQ ID NO: 5424 - DNA, 21 bp, synthetic construct
  source 1..21: mol_type = other DNA
  misc_feature 1..21: note = n-mer motif encoding polynucleotide
attgatagtacttggaatacg

SEQ ID NO: 5425 - DNA, 21 bp, synthetic construct
  misc_feature 1..21: note = n-mer motif encoding polynucleotide
  source 1..21: mol_type = other DNA
accgaatcgcaaaccatgagg

SEQ ID NO: 5426 - DNA, 21 bp, synthetic construct
  misc_feature 1..21: note = n-mer motif encoding polynucleotide
  source 1..21: mol_type = other DNA
ttgatccaaacgcaaggcacg

SEQ ID NO: 5427 - DNA, 21 bp, synthetic construct
  misc_feature 1..21: note = n-mer motif encoding polynucleotide
  source 1..21: mol_type = other DNA
atagtaaacataactcaatcg

SEQ ID NO: 5428 - DNA, 21 bp, synthetic construct
  misc_feature 1..21: note = n-mer motif encoding polynucleotide
  source 1..21: mol_type = other DNA
gtggcggtgtctaatacgcct

SEQ ID NO: 5429 - DNA, 21 bp, synthetic construct
  misc_feature 1..21: note = n-mer motif encoding polynucleotide
  source 1..21: mol_type = other DNA
ggtcatagggattcgggtggt

SEQ ID NO: 5430 - DNA, 21 bp, synthetic construct
  source 1..21: mol_type = other DNA
  misc_feature 1..21: note = n-mer motif encoding polynucleotide
cggaatgagaatcttaataat

SEQ ID NO: 5431 - DNA, 21 bp, synthetic construct
  source 1..21: mol_type = other DNA
  misc_feature 1..21: note = n-mer motif encoding polynucleotide
gtcatgcaacgatctgcacaa

SEQ ID NO: 5432 - DNA, 21 bp, synthetic construct
  source 1..21: mol_type = other DNA
  misc_feature 1..21: note = n-mer motif encoding polynucleotide
gtctcgggtccggtatcggtc

SEQ ID NO: 5433 - DNA, 21 bp, synthetic construct
  misc_feature 1..21: note = n-mer motif encoding polynucleotide
  source 1..21: mol_type = other DNA
ggggatattcagagtcatagt

SEQ ID NO: 5434 - DNA, 21 bp, synthetic construct
  misc_feature 1..21: note = n-mer motif encoding polynucleotide
  source 1..21: mol_type = other DNA
gttgagaagcctctggagact

SEQ ID NO: 5435 - DNA, 21 bp, synthetic construct
  source 1..21: mol_type = other DNA
  misc_feature 1..21: note = n-mer motif encoding polynucleotide
ggtgttcagatgactgcgggg

SEQ ID NO: 5436 - DNA, 21 bp, synthetic construct
  misc_feature 1..21: note = n-mer motif encoding polynucleotide
  source 1..21: mol_type = other DNA
accacaaaaacgacatctatg

SEQ ID NO: 5437 - DNA, 21 bp, synthetic construct
  misc_feature 1..21: note = n-mer motif encoding polynucleotide
  source 1..21: mol_type = other DNA
cctgggaatccgtctagtaat

SEQ ID NO: 5438 - DNA, 21 bp, synthetic construct
  misc_feature 1..21: note = n-mer motif encoding polynucleotide
  source 1..21: mol_type = other DNA
gcttcgcggcctgcggctcag

SEQ ID NO: 5439 - DNA, 21 bp, synthetic construct
  source 1..21: mol_type = other DNA
  misc_feature 1..21: note = n-mer motif encoding polynucleotide
gttcatgatcagggggctggg

SEQ ID NO: 5440 - DNA, 21 bp, synthetic construct
  misc_feature 1..21: note = n-mer motif encoding polynucleotide
  source 1..21: mol_type = other DNA
tcaggttcggaataccgtacc

SEQ ID NO: 5441 - DNA, 21 bp, synthetic construct
  misc_feature 1..21: note = n-mer motif encoding polynucleotide
  source 1..21: mol_type = other DNA
tacgtggacgacaacagtcgc

SEQ ID NO: 5442 - DNA, 21 bp, synthetic construct
  misc_feature 1..21: note = n-mer motif encoding polynucleotide
  source 1..21: mol_type = other DNA
atggccggtgaccaagaactc

SEQ ID NO: 5443 - DNA, 21 bp, synthetic construct
  source 1..21: mol_type = other DNA
  misc_feature 1..21: note = n-mer motif encoding polynucleotide
cctttgcacaacatacctcct

SEQ ID NO: 5444 - DNA, 21 bp, synthetic construct
  source 1..21: mol_type = other DNA
  misc_feature 1..21: note = n-mer motif encoding polynucleotide
agtgggattggtacttattct

SEQ ID NO: 5445 - DNA, 21 bp, synthetic construct
  source 1..21: mol_type = other DNA
  misc_feature 1..21: note = n-mer motif encoding polynucleotide
tcgaacgcagacatcctcgcc

SEQ ID NO: 5446 - DNA, 21 bp, synthetic construct
  misc_feature 1..21: note = n-mer motif encoding polynucleotide
  source 1..21: mol_type = other DNA
agtcacaaccaagtaaacgta

SEQ ID NO: 5447 - DNA, 21 bp, synthetic construct
  misc_feature 1..21: note = n-mer motif encoding polynucleotide
  source 1..21: mol_type = other DNA
cagcattctccgaagccggtt

SEQ ID NO: 5448 - DNA, 21 bp, synthetic construct
  misc_feature 1..21: note = n-mer motif encoding polynucleotide
  source 1..21: mol_type = other DNA
tccgcaaacaacatagccccc

SEQ ID NO: 5449 - DNA, 21 bp, synthetic construct
  misc_feature 1..21: note = n-mer motif encoding polynucleotide
  source 1..21: mol_type = other DNA
gaagaaacacggaccagaatg

SEQ ID NO: 5450 - DNA, 21 bp, synthetic construct
  misc_feature 1..21: note = n-mer motif encoding polynucleotide
  source 1..21: mol_type = other DNA
ctgtctaattcgattacgcct

SEQ ID NO: 5451 - DNA, 21 bp, synthetic construct
  misc_feature 1..21: note = n-mer motif encoding polynucleotide
  source 1..21: mol_type = other DNA
agtgctttgaatagtgtggat

SEQ ID NO: 5452 - DNA, 21 bp, synthetic construct
  source 1..21: mol_type = other DNA
  misc_feature 1..21: note = n-mer motif encoding polynucleotide
actaatcttgctgttacgctg

SEQ ID NO: 5453 - DNA, 21 bp, synthetic construct
  source 1..21: mol_type = other DNA
  misc_feature 1..21: note = n-mer motif encoding polynucleotide
cagtcgacgctgaataggcct

SEQ ID NO: 5454 - DNA, 21 bp, synthetic construct
  misc_feature 1..21: note = n-mer motif encoding polynucleotide
  source 1..21: mol_type = other DNA
atagaacacatgcttagaccc

SEQ ID NO: 5455 - DNA, 21 bp, synthetic construct
  misc_feature 1..21: note = n-mer motif encoding polynucleotide
  source 1..21: mol_type = other DNA
ccgactcctaatgagcatatg

SEQ ID NO: 5456 - DNA, 21 bp, synthetic construct
  source 1..21: mol_type = other DNA
  misc_feature 1..21: note = n-mer motif encoding polynucleotide
attaatgagattggtaggatg

SEQ ID NO: 5457 - DNA, 21 bp, synthetic construct
  misc_feature 1..21: note = n-mer motif encoding polynucleotide
  source 1..21: mol_type = other DNA
aacaacgacaacgtctacgtg

SEQ ID NO: 5458 - DNA, 21 bp, synthetic construct
  misc_feature 1..21: note = n-mer motif encoding polynucleotide
  source 1..21: mol_type = other DNA
atagtccacaccccgcaagtg

SEQ ID NO: 5459 - DNA, 21 bp, synthetic construct
  misc_feature 1..21: note = n-mer motif encoding polynucleotide
  source 1..21: mol_type = other DNA
cataagagtgagagtcataat

SEQ ID NO: 5460 - DNA, 21 bp, synthetic construct
  misc_feature 1..21: note = n-mer motif encoding polynucleotide
  source 1..21: mol_type = other DNA
tcatcgtcagactcacccaga

SEQ ID NO: 5461 - DNA, 21 bp, synthetic construct
  misc_feature 1..21: note = n-mer motif encoding polynucleotide
  source 1..21: mol_type = other DNA
tactctacagaagcacgagtc

SEQ ID NO: 5462 - DNA, 21 bp, synthetic construct
  source 1..21: mol_type = other DNA
  misc_feature 1..21: note = n-mer motif encoding polynucleotide
acctcgggtgaccggtacacg

SEQ ID NO: 5463 - DNA, 21 bp, synthetic construct
  misc_feature 1..21: note = n-mer motif encoding polynucleotide
  source 1..21: mol_type = other DNA
gagaagaatctgactaatgct

SEQ ID NO: 5464 - DNA, 21 bp, synthetic construct
  source 1..21: mol_type = other DNA
  misc_feature 1..21: note = n-mer motif encoding polynucleotide
acaagggaccaaaggtctaca

SEQ ID NO: 5465 - DNA, 21 bp, synthetic construct
  source 1..21: mol_type = other DNA
  misc_feature 1..21: note = n-mer motif encoding polynucleotide
gcgactgataagatgactcct

SEQ ID NO: 5466 - DNA, 21 bp, synthetic construct
  misc_feature 1..21: note = n-mer motif encoding polynucleotide
  source 1..21: mol_type = other DNA
aatagttatactgctgggaag

SEQ ID NO: 5467 - DNA, 21 bp, synthetic construct
  source 1..21: mol_type = other DNA
  misc_feature 1..21: note = n-mer motif encoding polynucleotide
acgctggatactaaggatctt

SEQ ID NO: 5468 - DNA, 21 bp, synthetic construct
  source 1..21: mol_type = other DNA
  misc_feature 1..21: note = n-mer motif encoding polynucleotide
gcatccaacgggcaagttaac

SEQ ID NO: 5469 - DNA, 21 bp, synthetic construct
  source 1..21: mol_type = other DNA
  misc_feature 1..21: note = n-mer motif encoding polynucleotide
acctcaatatcgtcgcaaagc

SEQ ID NO: 5470 - DNA, 21 bp, synthetic construct
  misc_feature 1..21: note = n-mer motif encoding polynucleotide
  source 1..21: mol_type = other DNA
gataatagtcctgctaatcat

SEQ ID NO: 5471 - DNA, 21 bp, synthetic construct
  source 1..21: mol_type = other DNA
  misc_feature 1..21: note = n-mer motif encoding polynucleotide
aactccagggaaatgggtgta

SEQ ID NO: 5472 - DNA, 21 bp, synthetic construct
  source 1..21: mol_type = other DNA
  misc_feature 1..21: note = n-mer motif encoding polynucleotide
accagcgcgtctgaaaactgg

SEQ ID NO: 5473 - DNA, 21 bp, synthetic construct
  source 1..21: mol_type = other DNA
  misc_feature 1..21: note = n-mer motif encoding polynucleotide
actgtaggatcctcatacgct

SEQ ID NO: 5474 - DNA, 21 bp, synthetic construct
  misc_feature 1..21: note = n-mer motif encoding polynucleotide
  source 1..21: mol_type = other DNA
caacaatcacaaaactctata

SEQ ID NO: 5475 - DNA, 21 bp, synthetic construct
  source 1..21: mol_type = other DNA
  misc_feature 1..21: note = n-mer motif encoding polynucleotide
cttcgggatgggattgcttct

SEQ ID NO: 5476 - DNA, 21 bp, synthetic construct
  source 1..21: mol_type = other DNA
  misc_feature 1..21: note = n-mer motif encoding polynucleotide
gtgcaaaaaacgacggcttgg

SEQ ID NO: 5477 - DNA, 21 bp, synthetic construct
  source 1..21: mol_type = other DNA
  misc_feature 1..21: note = n-mer motif encoding polynucleotide
atgagtacggttcttcgggag

SEQ ID NO: 5478 - DNA, 21 bp, synthetic construct
  misc_feature 1..21: note = n-mer motif encoding polynucleotide
  source 1..21: mol_type = other DNA
agtatggatgctcggttgacg

SEQ ID NO: 5479 - DNA, 21 bp, synthetic construct
  source 1..21: mol_type = other DNA
  misc_feature 1..21: note = n-mer motif encoding polynucleotide
ggcgcccgtacaatcttagac

SEQ ID NO: 5480 - DNA, 21 bp, synthetic construct
  misc_feature 1..21: note = n-mer motif encoding polynucleotide
  source 1..21: mol_type = other DNA
cacgaaagccactacgtgtca

SEQ ID NO: 5481 - DNA, 21 bp, synthetic construct
  source 1..21: mol_type = other DNA
  misc_feature 1..21: note = n-mer motif encoding polynucleotide
cttgagggtcagaataagacg

SEQ ID NO: 5482 - DNA, 21 bp, synthetic construct
  misc_feature 1..21: note = n-mer motif encoding polynucleotide
  source 1..21: mol_type = other DNA
cgggacttgagacccgtgacg

SEQ ID NO: 5483 - DNA, 21 bp, synthetic construct
  source 1..21: mol_type = other DNA
  misc_feature 1..21: note = n-mer motif encoding polynucleotide
cagattttgaattatagtgtg

SEQ ID NO: 5484 - DNA, 21 bp, synthetic construct
  source 1..21: mol_type = other DNA
  misc_feature 1..21: note = n-mer motif encoding polynucleotide
ataagtgtaggtgtgtccgta

SEQ ID NO: 5485 - DNA, 21 bp, synthetic construct
  source 1..21: mol_type = other DNA
  misc_feature 1..21: note = n-mer motif encoding polynucleotide
aaggcgggtgagtatagggat

SEQ ID NO: 5486 - DNA, 21 bp, synthetic construct
  misc_feature 1..21: note = n-mer motif encoding polynucleotide
  source 1..21: mol_type = other DNA
cttactacgaatggtatgctg

SEQ ID NO: 5487 - DNA, 21 bp, synthetic construct
  misc_feature 1..21: note = n-mer motif encoding polynucleotide
  source 1..21: mol_type = other DNA
actagtaattatatgcatgag

SEQ ID NO: 5488 - DNA, 21 bp, synthetic construct
  misc_feature 1..21: note = n-mer motif encoding polynucleotide
  source 1..21: mol_type = other DNA
acccacaactctacaggcctt

SEQ ID NO: 5489 - DNA, 21 bp, synthetic construct
  misc_feature 1..21: note = n-mer motif encoding polynucleotide
  source 1..21: mol_type = other DNA
aataatgttgttagggatgat

SEQ ID NO: 5490 - DNA, 21 bp, synthetic construct
  source 1..21: mol_type = other DNA
  misc_feature 1..21: note = n-mer motif encoding polynucleotide
agtgggacgtatgctagtcgt

SEQ ID NO: 5491 - DNA, 21 bp, synthetic construct
  misc_feature 1..21: note = n-mer motif encoding polynucleotide
  source 1..21: mol_type = other DNA
ctgtctcacgccatggaccgg

SEQ ID NO: 5492 - DNA, 21 bp, synthetic construct
  misc_feature 1..21: note = n-mer motif encoding polynucleotide
  source 1..21: mol_type = other DNA
aattggaattctgagggtacg

SEQ ID NO: 5493 - DNA, 21 bp, synthetic construct
  source 1..21: mol_type = other DNA
  misc_feature 1..21: note = n-mer motif encoding polynucleotide
agtctgcgtccaaccctacct

SEQ ID NO: 5494 - DNA, 21 bp, synthetic construct
  misc_feature 1..21: note = n-mer motif encoding polynucleotide
  source 1..21: mol_type = other DNA
taccaaacgggagacaaagac

SEQ ID NO: 5495 - DNA, 21 bp, synthetic construct
  source 1..21: mol_type = other DNA
  misc_feature 1..21: note = n-mer motif encoding polynucleotide
cgcagcgacaaaggaacgttg

SEQ ID NO: 5496 - DNA, 21 bp, synthetic construct
  source 1..21: mol_type = other DNA
  misc_feature 1..21: note = n-mer motif encoding polynucleotide
tctaccatcggcaacagcacg

SEQ ID NO: 5497 - DNA, 21 bp, synthetic construct
  source 1..21: mol_type = other DNA
  misc_feature 1..21: note = n-mer motif encoding polynucleotide
gaaaacaacatgcaacacggc

SEQ ID NO: 5498 - DNA, 21 bp, synthetic construct
  source 1..21: mol_type = other DNA
  misc_feature 1..21: note = n-mer motif encoding polynucleotide
aagtatacggagtcgaatgcg

SEQ ID NO: 5499 - DNA, 21 bp, synthetic construct
  source 1..21: mol_type = other DNA
  misc_feature 1..21: note = n-mer motif encoding polynucleotide
ccaacaaacaacttaagtatg

SEQ ID NO: 5500 - DNA, 21 bp, synthetic construct
  misc_feature 1..21: note = n-mer motif encoding polynucleotide
  source 1..21: mol_type = other DNA
tgcaaaaacaactcagaatgc

SEQ ID NO: 5501 - DNA, 21 bp, synthetic construct
  misc_feature 1..21: note = n-mer motif encoding polynucleotide
  source 1..21: mol_type = other DNA
acggttaatgcggatgggtcg

SEQ ID NO: 5502 - DNA, 21 bp, synthetic construct
  source 1..21: mol_type = other DNA
  misc_feature 1..21: note = n-mer motif encoding polynucleotide
ttttctggtcaggcgttggct

SEQ ID NO: 5503 - DNA, 21 bp, synthetic construct
  misc_feature 1..21: note = n-mer motif encoding polynucleotide
  source 1..21: mol_type = other DNA
aatcatattaggaatcctatg

SEQ ID NO: 5504 - DNA, 21 bp, synthetic construct
  misc_feature 1..21: note = n-mer motif encoding polynucleotide
  source 1..21: mol_type = other DNA
atggtgaattcggagaatact

SEQ ID NO: 5505 - DNA, 21 bp, synthetic construct
  misc_feature 1..21: note = n-mer motif encoding polynucleotide
  source 1..21: mol_type = other DNA
actgatgggccgcgtctggct

SEQ ID NO: 5506 - DNA, 21 bp, synthetic construct
  source 1..21: mol_type = other DNA
  misc_feature 1..21: note = n-mer motif encoding polynucleotide
ttcaacgggtacgtcatggca

SEQ ID NO: 5507 - DNA, 21 bp, synthetic construct
  misc_feature 1..21: note = n-mer motif encoding polynucleotide
  source 1..21: mol_type = other DNA
aatgcgaatgggcctgtgagt

SEQ ID NO: 5508 - DNA, 21 bp, synthetic construct
  misc_feature 1..21: note = n-mer motif encoding polynucleotide
  source 1..21: mol_type = other DNA
agtacgagtcaggagaatagg

SEQ ID NO: 5509 - DNA, 21 bp, synthetic construct
  source 1..21: mol_type = other DNA
  misc_feature 1..21: note = n-mer motif encoding polynucleotide
caagggactctcttgtctcca

SEQ ID NO: 5510 - DNA, 21 bp, synthetic construct
  source 1..21: mol_type = other DNA
  misc_feature 1..21: note = n-mer motif encoding polynucleotide
ctaatcacagccaccactaac

SEQ ID NO: 5511 - DNA, 21 bp, synthetic construct
  misc_feature 1..21: note = n-mer motif encoding polynucleotide
  source 1..21: mol_type = other DNA
tctggcgtctcgaaagaacgg

SEQ ID NO: 5512 - DNA, 21 bp, synthetic construct
  source 1..21: mol_type = other DNA
  misc_feature 1..21: note = n-mer motif encoding polynucleotide
tctacttcaataggagtggta

SEQ ID NO: 5513 - DNA, 21 bp, synthetic construct
  source 1..21: mol_type = other DNA
  misc_feature 1..21: note = n-mer motif encoding polynucleotide
tctcatgtgactgttacggat

SEQ ID NO: 5514 - DNA, 21 bp, synthetic construct
  misc_feature 1..21: note = n-mer motif encoding polynucleotide
  source 1..21: mol_type = other DNA
tctaataatctgaatcaggag

SEQ ID NO: 5515 - DNA, 21 bp, synthetic construct
  source 1..21: mol_type = other DNA
  misc_feature 1..21: note = n-mer motif encoding polynucleotide
gcaaaccacgacaacatcgtg

SEQ ID NO: 5516 - DNA, 21 bp, synthetic construct
  source 1..21: mol_type = other DNA
  misc_feature 1..21: note = n-mer motif encoding polynucleotide
gacacgtcctccggcaacagg

SEQ ID NO: 5517 - DNA, 21 bp, synthetic construct
  misc_feature 1..21: note = n-mer motif encoding polynucleotide
  source 1..21: mol_type = other DNA
gtggttcctatgcctactact

SEQ ID NO: 5518 - DNA, 21 bp, synthetic construct
  misc_feature 1..21: note = n-mer motif encoding polynucleotide
  source 1..21: mol_type = other DNA
cttactaataattttaaggat

SEQ ID NO: 5519 - DNA, 21 bp, synthetic construct
  misc_feature 1..21: note = n-mer motif encoding polynucleotide
  source 1..21: mol_type = other DNA
tcttcgcctactaagggtact

SEQ ID NO: 5520 - DNA, 21 bp, synthetic construct
  source 1..21: mol_type = other DNA
  misc_feature 1..21: note = n-mer motif encoding polynucleotide
gatattccgtctgataatacg

SEQ ID NO: 5521 - DNA, 21 bp, synthetic construct
  source 1..21: mol_type = other DNA
  misc_feature 1..21: note = n-mer motif encoding polynucleotide
tacacgggattcgaattgaga

SEQ ID NO: 5522 - DNA, 21 bp, synthetic construct
  misc_feature 1..21: note = n-mer motif encoding polynucleotide
  source 1..21: mol_type = other DNA
aactcaggtaacaaccccatc

SEQ ID NO: 5523 - DNA, 21 bp, synthetic construct
  source 1..21: mol_type = other DNA
  misc_feature 1..21: note = n-mer motif encoding polynucleotide
acgacccgaaacgaacactcg

SEQ ID NO: 5524 - DNA, 21 bp, synthetic construct
  source 1..21: mol_type = other DNA
  misc_feature 1..21: note = n-mer motif encoding polynucleotide
aatgtgggtaatactcttggg

SEQ ID NO: 5525 - DNA, 21 bp, synthetic construct
  source 1..21: mol_type = other DNA
  misc_feature 1..21: note = n-mer motif encoding polynucleotide
taccacacccaccaagtcgca

SEQ ID NO: 5526 - DNA, 21 bp, synthetic construct
  source 1..21: mol_type = other DNA
  misc_feature 1..21: note = n-mer motif encoding polynucleotide
ggtagtgcgagtaatagtggt

SEQ ID NO: 5527 - DNA, 21 bp, synthetic construct
  misc_feature 1..21: note = n-mer motif encoding polynucleotide
  source 1..21: mol_type = other DNA
gggaagaatcagcctactccg

SEQ ID NO: 5528 - DNA, 21 bp, synthetic construct
  misc_feature 1..21: note = n-mer motif encoding polynucleotide
  source 1..21: mol_type = other DNA
ttcaccgccactttaggaacc

SEQ ID NO: 5529 - DNA, 21 bp, synthetic construct
  misc_feature 1..21: note = n-mer motif encoding polynucleotide
  source 1..21: mol_type = other DNA
atgaaccaaatgggcggcctg

SEQ ID NO: 5530 - DNA, 21 bp, synthetic construct
  source 1..21: mol_type = other DNA
  misc_feature 1..21: note = n-mer motif encoding polynucleotide
aacgtgtcactaacgcaaacg

SEQ ID NO: 5531 - DNA, 21 bp, synthetic construct
  source 1..21: mol_type = other DNA
  misc_feature 1..21: note = n-mer motif encoding polynucleotide
tcgtctagcaacacaaacgct

SEQ ID NO: 5532 - DNA, 21 bp, synthetic construct
  source 1..21: mol_type = other DNA
  misc_feature 1..21: note = n-mer motif encoding polynucleotide
actaattctaatcagagttcg

SEQ ID NO: 5533 - DNA, 21 bp, synthetic construct
  misc_feature 1..21: note = n-mer motif encoding polynucleotide
  source 1..21: mol_type = other DNA
ataagtcacgaccttaaatac

SEQ ID NO: 5534 - DNA, 21 bp, synthetic construct
  misc_feature 1..21: note = n-mer motif encoding polynucleotide
  source 1..21: mol_type = other DNA
gattcgacgtatgttttggct

SEQ ID NO: 5535 - DNA, 21 bp, synthetic construct
  misc_feature 1..21: note = n-mer motif encoding polynucleotide
  source 1..21: mol_type = other DNA
atgaacaccggctcttcgagt

SEQ ID NO: 5536 - DNA, 21 bp, synthetic construct
  misc_feature 1..21: note = n-mer motif encoding polynucleotide
  source 1..21: mol_type = other DNA
gccggaaactaccaatcatca

SEQ ID NO: 5537 - DNA, 21 bp, synthetic construct
  misc_feature 1..21: note = n-mer motif encoding polynucleotide
  source 1..21: mol_type = other DNA
acgatttataatatgggtccg

SEQ ID NO: 5538 - DNA, 21 bp, synthetic construct
  source 1..21: mol_type = other DNA
  misc_feature 1..21: note = n-mer motif encoding polynucleotide
gtatcaacgacaacggaccgg

SEQ ID NO: 5539 - DNA, 21 bp, synthetic construct
  misc_feature 1..21: note = n-mer motif encoding polynucleotide
  source 1..21: mol_type = other DNA
ggggtgactgttagggagctt

SEQ ID NO: 5540 - DNA, 21 bp, synthetic construct
  misc_feature 1..21: note = n-mer motif encoding polynucleotide
  source 1..21: mol_type = other DNA
gatattactaatcagtcgtat

SEQ ID NO: 5541 - DNA, 21 bp, synthetic construct
  misc_feature 1..21: note = n-mer motif encoding polynucleotide
  source 1..21: mol_type = other DNA
aatcagtcgcttactatggat

SEQ ID NO: 5542 - DNA, 21 bp, synthetic construct
  source 1..21: mol_type = other DNA
  misc_feature 1..21: note = n-mer motif encoding polynucleotide
acgaattataatattggtccg

SEQ ID NO: 5543 - DNA, 21 bp, synthetic construct
  misc_feature 1..21: note = n-mer motif encoding polynucleotide
  source 1..21: mol_type = other DNA
cgtggtacggaggggacgccg

SEQ ID NO: 5544 - DNA, 21 bp, synthetic construct
  misc_feature 1..21: note = n-mer motif encoding polynucleotide
  source 1..21: mol_type = other DNA
cccataacacgggaatcggga

SEQ ID NO: 5545 - DNA, 21 bp, synthetic construct
  misc_feature 1..21: note = n-mer motif encoding polynucleotide
  source 1..21: mol_type = other DNA
accggacaagcgggcggatcg

SEQ ID NO: 5546 - DNA, 21 bp, synthetic construct
  misc_feature 1..21: note = n-mer motif encoding polynucleotide
  source 1..21: mol_type = other DNA
atgactaaacacgacgcgacg

SEQ ID NO: 5547 - DNA, 21 bp, synthetic construct
  misc_feature 1..21: note = n-mer motif encoding polynucleotide
  source 1..21: mol_type = other DNA
cctataccccacggttcatcc

SEQ ID NO: 5548 - DNA, 21 bp, synthetic construct
  misc_feature 1..21: note = n-mer motif encoding polynucleotide
  source 1..21: mol_type = other DNA
acgactggggggacggggatg

SEQ ID NO: 5549 - DNA, 21 bp, synthetic construct
  source 1..21: mol_type = other DNA
  misc_feature 1..21: note = n-mer motif encoding polynucleotide
ctaaccgaatctgtgagaaac

SEQ ID NO: 5550 - DNA, 21 bp, synthetic construct
  misc_feature 1..21: note = n-mer motif encoding polynucleotide
  source 1..21: mol_type = other DNA
agtagtaatctgactttgtct

SEQ ID NO: 5551 - DNA, 21 bp, synthetic construct
  source 1..21: mol_type = other DNA
  misc_feature 1..21: note = n-mer motif encoding polynucleotide
ttgaataattctgcgactgtt

SEQ ID NO: 5552 - DNA, 21 bp, synthetic construct
  source 1..21: mol_type = other DNA
  misc_feature 1..21: note = n-mer motif encoding polynucleotide
gcatacggatcgtccggaaga

SEQ ID NO: 5553 - DNA, 21 bp, synthetic construct
  misc_feature 1..21: note = n-mer motif encoding polynucleotide
  source 1..21: mol_type = other DNA
gtttcttatgataatgggtcg

SEQ ID NO: 5554 - DNA, 21 bp, synthetic construct
  source 1..21: mol_type = other DNA
  misc_feature 1..21: note = n-mer motif encoding polynucleotide
ccgagtcagagtaggtcgctt

SEQ ID NO: 5555 - DNA, 21 bp, synthetic construct
  source 1..21: mol_type = other DNA
  misc_feature 1..21: note = n-mer motif encoding polynucleotide
gtcctggttaacgtacacaac

SEQ ID NO: 5556 - DNA, 21 bp, synthetic construct
  source 1..21: mol_type = other DNA
  misc_feature 1..21: note = n-mer motif encoding polynucleotide
ttgatgactggtactgcgtcg

SEQ ID NO: 5557 - DNA, 21 bp, synthetic construct
  source 1..21: mol_type = other DNA
  misc_feature 1..21: note = n-mer motif encoding polynucleotide
gctgctggtaatcctactcgt

SEQ ID NO: 5558 - DNA, 21 bp, synthetic construct
  source 1..21: mol_type = other DNA
  misc_feature 1..21: note = n-mer motif encoding polynucleotide
tccgcgcaatctttcgtagtt

SEQ ID NO: 5559 - DNA, 21 bp, synthetic construct
  misc_feature 1..21: note = n-mer motif encoding polynucleotide
  source 1..21: mol_type = other DNA
caagaccaaacgagcaaccgt

SEQ ID NO: 5560 - DNA, 21 bp, synthetic construct
  source 1..21: mol_type = other DNA
  misc_feature 1..21: note = n-mer motif encoding polynucleotide
cagtcgattgggcatccggtg

SEQ ID NO: 5561 - DNA, 21 bp, synthetic construct
  source 1..21: mol_type = other DNA
  misc_feature 1..21: note = n-mer motif encoding polynucleotide
gctggggtgcgtgagtcgttt

SEQ ID NO: 5562 - DNA, 21 bp, synthetic construct
  source 1..21: mol_type = other DNA
  misc_feature 1..21: note = n-mer motif encoding polynucleotide
aatactaattatgcgatgcat

SEQ ID NO: 5563 - DNA, 21 bp, synthetic construct
  source 1..21: mol_type = other DNA
  misc_feature 1..21: note = n-mer motif encoding polynucleotide
gagcggagtacgcataatgtt

SEQ ID NO: 5564 - DNA, 21 bp, synthetic construct
  source 1..21: mol_type = other DNA
  misc_feature 1..21: note = n-mer motif encoding polynucleotide
atgtccggatccatgatatca

SEQ ID NO: 5565 - DNA, 21 bp, synthetic construct
  misc_feature 1..21: note = n-mer motif encoding polynucleotide
  source 1..21: mol_type = other DNA
tctggccaaggattctcggca

SEQ ID NO: 5566 - DNA, 21 bp, synthetic construct
  misc_feature 1..21: note = n-mer motif encoding polynucleotide
  source 1..21: mol_type = other DNA
acattcactactctgggcaaa

SEQ ID NO: 5567 - DNA, 21 bp, synthetic construct
  misc_feature 1..21: note = n-mer motif encoding polynucleotide
  source 1..21: mol_type = other DNA
gacgcaaacgctggcacaaga

SEQ ID NO: 5568 - DNA, 21 bp, synthetic construct
  source 1..21: mol_type = other DNA
  misc_feature 1..21: note = n-mer motif encoding polynucleotide
agggatacggctaagggggtg

SEQ ID NO: 5569 - DNA, 21 bp, synthetic construct
  source 1..21: mol_type = other DNA
  misc_feature 1..21: note = n-mer motif encoding polynucleotide
gtgcggtctggtaataagccg

SEQ ID NO: 5570 - DNA, 21 bp, synthetic construct
  misc_feature 1..21: note = n-mer motif encoding polynucleotide
  source 1..21: mol_type = other DNA
ccccaatggggaactgacccg

SEQ ID NO: 5571 - DNA, 21 bp, synthetic construct
  misc_feature 1..21: note = n-mer motif encoding polynucleotide
  source 1..21: mol_type = other DNA
gccttccaaaacaccggcgca

SEQ ID NO: 5572 - DNA, 21 bp, synthetic construct
  source 1..21: mol_type = other DNA
  misc_feature 1..21: note = n-mer motif encoding polynucleotide
gcgacgactcagctgatgact

SEQ ID NO: 5573 - DNA, 21 bp, synthetic construct
  source 1..21: mol_type = other DNA
  misc_feature 1..21: note = n-mer motif encoding polynucleotide
acgaacgcgagcgaaggctca

SEQ ID NO: 5574 - DNA, 21 bp, synthetic construct
  source 1..21: mol_type = other DNA
  misc_feature 1..21: note = n-mer motif encoding polynucleotide
atgctcacagaaaccaaagca

SEQ ID NO: 5575 - DNA, 21 bp, synthetic construct
  source 1..21: mol_type = other DNA
  misc_feature 1..21: note = n-mer motif encoding polynucleotide
acgaataatttgctggctcag

SEQ ID NO: 5576 - DNA, 21 bp, synthetic construct
  misc_feature 1..21: note = n-mer motif encoding polynucleotide
  source 1..21: mol_type = other DNA
gatgttttgcttaagaatttt

SEQ ID NO: 5577 - DNA, 21 bp, synthetic construct
  source 1..21: mol_type = other DNA
  misc_feature 1..21: note = n-mer motif encoding polynucleotide
tatacgcctgggcttactgag

SEQ ID NO: 5578 - DNA, 21 bp, synthetic construct
  misc_feature 1..21: note = n-mer motif encoding polynucleotide
  source 1..21: mol_type = other DNA
cggcatgcttcggatgctaat

SEQ ID NO: 5579 - DNA, 21 bp, synthetic construct
  source 1..21: mol_type = other DNA
  misc_feature 1..21: note = n-mer motif encoding polynucleotide
agtaagggtgatcagcttaat

SEQ ID NO: 5580 - DNA, 21 bp, synthetic construct
  source 1..21: mol_type = other DNA
  misc_feature 1..21: note = n-mer motif encoding polynucleotide
gtgctggttactcagaatcat

SEQ ID NO: 5581 - DNA, 21 bp, synthetic construct
  misc_feature 1..21: note = n-mer motif encoding polynucleotide
  source 1..21: mol_type = other DNA
cgacaaggcgacttaaaagaa

SEQ ID NO: 5582 - DNA, 21 bp, synthetic construct
  source 1..21: mol_type = other DNA
  misc_feature 1..21: note = n-mer motif encoding polynucleotide
attcagtcgcagtcgcagttg

SEQ ID NO: 5583 - DNA, 21 bp, synthetic construct
  source 1..21: mol_type = other DNA
  misc_feature 1..21: note = n-mer motif encoding polynucleotide
aaaatagaaagcggaaccata

SEQ ID NO: 5584 - DNA, 21 bp, synthetic construct
  misc_feature 1..21: note = n-mer motif encoding polynucleotide
  source 1..21: mol_type = other DNA
acaactcttagccaacaaagc

SEQ ID NO: 5585 - DNA, 21 bp, synthetic construct
  misc_feature 1..21: note = n-mer motif encoding polynucleotide
  source 1..21: mol_type = other DNA
tttcagttggctagtaatccg

SEQ ID NO: 5586 - DNA, 21 bp, synthetic construct
  source 1..21: mol_type = other DNA
  misc_feature 1..21: note = n-mer motif encoding polynucleotide
tggatttctactgagatgagg

SEQ ID NO: 5587 - DNA, 21 bp, synthetic construct
  misc_feature 1..21: note = n-mer motif encoding polynucleotide
  source 1..21: mol_type = other DNA
gccataacaatcactcaaaaa

SEQ ID NO: 5588 - DNA, 21 bp, synthetic construct
  misc_feature 1..21: note = n-mer motif encoding polynucleotide
  source 1..21: mol_type = other DNA
gttactggtgttgattatgcg

SEQ ID NO: 5589 - DNA, 21 bp, synthetic construct
  source 1..21: mol_type = other DNA
  misc_feature 1..21: note = n-mer motif encoding polynucleotide
ataatagcatcctctaccacg

SEQ ID NO: 5590 - DNA, 21 bp, synthetic construct
  misc_feature 1..21: note = n-mer motif encoding polynucleotide
  source 1..21: mol_type = other DNA
atttatacgaatagtcatgtt

SEQ ID NO: 5591 - DNA, 21 bp, synthetic construct
  misc_feature 1..21: note = n-mer motif encoding polynucleotide
  source 1..21: mol_type = other DNA
aacgacatccccacacgagcc

SEQ ID NO: 5592 - DNA, 21 bp, synthetic construct
  source 1..21: mol_type = other DNA
  misc_feature 1..21: note = n-mer motif encoding polynucleotide
ggcgtaaccaacgcttccaaa

SEQ ID NO: 5593 - DNA, 21 bp, synthetic construct
  source 1..21: mol_type = other DNA
  misc_feature 1..21: note = n-mer motif encoding polynucleotide
aggggtaacactctcgaaatg

SEQ ID NO: 5594 - DNA, 21 bp, synthetic construct
  source 1..21: mol_type = other DNA
  misc_feature 1..21: note = n-mer motif encoding polynucleotide
ggtattaatcatgtggcgtct

SEQ ID NO: 5595 - DNA, 21 bp, synthetic construct
  misc_feature 1..21: note = n-mer motif encoding polynucleotide
  source 1..21: mol_type = other DNA
ttcaacgaaactgccgggcga

SEQ ID NO: 5596 - DNA, 21 bp, synthetic construct
  source 1..21: mol_type = other DNA
  misc_feature 1..21: note = n-mer motif encoding polynucleotide
gcctcgcaatcagaaaaaaac

SEQ ID NO: 5597 - DNA, 21 bp, synthetic construct
  misc_feature 1..21: note = n-mer motif encoding polynucleotide
  source 1..21: mol_type = other DNA
gaacttaacgaaaggaacctc

SEQ ID NO: 5598 - DNA, 21 bp, synthetic construct
  source 1..21: mol_type = other DNA
  misc_feature 1..21: note = n-mer motif encoding polynucleotide
ggagaacaaagccacaaccaa

SEQ ID NO: 5599 - DNA, 21 bp, synthetic construct
  source 1..21: mol_type = other DNA
  misc_feature 1..21: note = n-mer motif encoding polynucleotide
ttgactaatgataataagttg

SEQ ID NO: 5600 - DNA, 21 bp, synthetic construct
  source 1..21: mol_type = other DNA
  misc_feature 1..21: note = n-mer motif encoding polynucleotide
tcttatgggcagggtctggag

SEQ ID NO: 5601 - DNA, 21 bp, synthetic construct
  source 1..21: mol_type = other DNA
  misc_feature 1..21: note = n-mer motif encoding polynucleotide
cacagtgacatgggctcaagc

SEQ ID NO: 5602 - DNA, 21 bp, synthetic construct
  source 1..21: mol_type = other DNA
  misc_feature 1..21: note = n-mer motif encoding polynucleotide
gcgttaaaatccgacagcgcc

SEQ ID NO: 5603 - DNA, 21 bp, synthetic construct
  source 1..21: mol_type = other DNA
  misc_feature 1..21: note = n-mer motif encoding polynucleotide
acgaatctttctcctaagacg

SEQ ID NO: 5604 - DNA, 21 bp, synthetic construct
  misc_feature 1..21: note = n-mer motif encoding polynucleotide
  source 1..21: mol_type = other DNA
gctgatacgaatattattgtg

SEQ ID NO: 5605 - DNA, 21 bp, synthetic construct
  misc_feature 1..21: note = n-mer motif encoding polynucleotide
  source 1..21: mol_type = other DNA
agtgagggtagttcgcggtcg

SEQ ID NO: 5606 - DNA, 21 bp, synthetic construct
  source 1..21: mol_type = other DNA
  misc_feature 1..21: note = n-mer motif encoding polynucleotide
aactctagtaacactggttgg

SEQ ID NO: 5607 - DNA, 21 bp, synthetic construct
  misc_feature 1..21: note = n-mer motif encoding polynucleotide
  source 1..21: mol_type = other DNA
gtaacgaacgaatcccgcgcc

SEQ ID NO: 5608 - DNA, 21 bp, synthetic construct
  source 1..21: mol_type = other DNA
  misc_feature 1..21: note = n-mer motif encoding polynucleotide
gggcggcacacattagcggac

SEQ ID NO: 5609 - DNA, 21 bp, synthetic construct
  misc_feature 1..21: note = n-mer motif encoding polynucleotide
  source 1..21: mol_type = other DNA
gctgttgtgaatgttgcgcag

SEQ ID NO: 5610 - DNA, 21 bp, synthetic construct
  source 1..21: mol_type = other DNA
  misc_feature 1..21: note = n-mer motif encoding polynucleotide
aaaaaaccacaacagtgacta

SEQ ID NO: 5611 - DNA, 21 bp, synthetic construct
  source 1..21: mol_type = other DNA
  misc_feature 1..21: note = n-mer motif encoding polynucleotide
ggcaacgcttccggaaaccca

SEQ ID NO: 5612 - DNA, 21 bp, synthetic construct
  misc_feature 1..21: note = n-mer motif encoding polynucleotide
  source 1..21: mol_type = other DNA
tttgcggctggggcgcatggt

SEQ ID NO: 5613 - DNA, 21 bp, synthetic construct
  source 1..21: mol_type = other DNA
  misc_feature 1..21: note = n-mer motif encoding polynucleotide
ggaggaaaccaaaaccttact

SEQ ID NO: 5614 - DNA, 21 bp, synthetic construct
  source 1..21: mol_type = other DNA
  misc_feature 1..21: note = n-mer motif encoding polynucleotide
catacgcagtcgacgggttat

SEQ ID NO: 5615 - DNA, 21 bp, synthetic construct
  source 1..21: mol_type = other DNA
  misc_feature 1..21: note = n-mer motif encoding polynucleotide
ctattgggaaacgcacccaca

SEQ ID NO: 5616 - DNA, 21 bp, synthetic construct
  misc_feature 1..21: note = n-mer motif encoding polynucleotide
  source 1..21: mol_type = other DNA
gagaaggggaatagtggggtt

SEQ ID NO: 5617 - DNA, 21 bp, synthetic construct
  source 1..21: mol_type = other DNA
  misc_feature 1..21: note = n-mer motif encoding polynucleotide
ggcacggaaccgcgcactgca

SEQ ID NO: 5618 - DNA, 21 bp, synthetic construct
  source 1..21: mol_type = other DNA
  misc_feature 1..21: note = n-mer motif encoding polynucleotide
atgcatgcgcaggagtctcgt

SEQ ID NO: 5619 - DNA, 21 bp, synthetic construct
  misc_feature 1..21: note = n-mer motif encoding polynucleotide
  source 1..21: mol_type = other DNA
ctgatttcgactggtaataat

SEQ ID NO: 5620 - DNA, 21 bp, synthetic construct
  misc_feature 1..21: note = n-mer motif encoding polynucleotide
  source 1..21: mol_type = other DNA
aagaataataattctgattct

SEQ ID NO: 5621 - DNA, 21 bp, synthetic construct
  misc_feature 1..21: note = n-mer motif encoding polynucleotide
  source 1..21: mol_type = other DNA
gggacattagcctcaatgtcc

SEQ ID NO: 5622 - DNA, 21 bp, synthetic construct
  source 1..21: mol_type = other DNA
  misc_feature 1..21: note = n-mer motif encoding polynucleotide
aggattgatacgttgttggtg

SEQ ID NO: 5623 - DNA, 21 bp, synthetic construct
  misc_feature 1..21: note = n-mer motif encoding polynucleotide
  source 1..21: mol_type = other DNA
atttcggggtctcatttgaat

SEQ ID NO: 5624 - DNA, 21 bp, synthetic construct
  misc_feature 1..21: note = n-mer motif encoding polynucleotide
  source 1..21: mol_type = other DNA
acggttgagggttcttatccg

SEQ ID NO: 5625 - DNA, 21 bp, synthetic construct
  misc_feature 1..21: note = n-mer motif encoding polynucleotide
  source 1..21: mol_type = other DNA
acggagtatctggctggtctg

SEQ ID NO: 5626 - DNA, 21 bp, synthetic construct
  source 1..21: mol_type = other DNA
  misc_feature 1..21: note = n-mer motif encoding polynucleotide
tatctggagggtgctcatcgt

SEQ ID NO: 5627 - DNA, 21 bp, synthetic construct
  source 1..21: mol_type = other DNA
  misc_feature 1..21: note = n-mer motif encoding polynucleotide
ttatccgcaacatctacgatg

SEQ ID NO: 5628 - DNA, 21 bp, synthetic construct
  misc_feature 1..21: note = n-mer motif encoding polynucleotide
  source 1..21: mol_type = other DNA
atgcttagtcaggttctgacg

SEQ ID NO: 5629 - DNA, 21 bp, synthetic construct
  misc_feature 1..21: note = n-mer motif encoding polynucleotide
  source 1..21: mol_type = other DNA
gccaggaacgtaatgctgggg

SEQ ID NO: 5630 - DNA, 21 bp, synthetic construct
  source 1..21: mol_type = other DNA
  misc_feature 1..21: note = n-mer motif encoding polynucleotide
cttcatgggaattttagtcag

SEQ ID NO: 5631 - DNA, 21 bp, synthetic construct
  misc_feature 1..21: note = n-mer motif encoding polynucleotide
  source 1..21: mol_type = other DNA
ggccacggaagtgacttgacc

SEQ ID NO: 5632 - DNA, 21 bp, synthetic construct
  source 1..21: mol_type = other DNA
  misc_feature 1..21: note = n-mer motif encoding polynucleotide
ggtgtgaattatcatactacg

SEQ ID NO: 5633 - DNA, 21 bp, synthetic construct
  misc_feature 1..21: note = n-mer motif encoding polynucleotide
  source 1..21: mol_type = other DNA
tatctgcagacgggtactctg

SEQ ID NO: 5634 - DNA, 21 bp, synthetic construct
  misc_feature 1..21: note = n-mer motif encoding polynucleotide
  source 1..21: mol_type = other DNA
gtaaacgggggaaaaccagtc

SEQ ID NO: 5635 - DNA, 21 bp, synthetic construct
  misc_feature 1..21: note = n-mer motif encoding polynucleotide
  source 1..21: mol_type = other DNA
gaagtaggtaaaaccacccac

SEQ ID NO: 5636 - DNA, 21 bp, synthetic construct
  misc_feature 1..21: note = n-mer motif encoding polynucleotide
  source 1..21: mol_type = other DNA
cgacccccgaacgaaaacaga

SEQ ID NO: 5637 - DNA, 21 bp, synthetic construct
  source 1..21: mol_type = other DNA
  misc_feature 1..21: note = n-mer motif encoding polynucleotide
gtggataagaatcatcctttg

SEQ ID NO: 5638 - DNA, 21 bp, synthetic construct
  source 1..21: mol_type = other DNA
  misc_feature 1..21: note = n-mer motif encoding polynucleotide
agtaagtcgactgagattatg

SEQ ID NO: 5639 - DNA, 21 bp, synthetic construct
  misc_feature 1..21: note = n-mer motif encoding polynucleotide
  source 1..21: mol_type = other DNA
accgctcttctatctaactta

SEQ ID NO: 5640 - DNA, 21 bp, synthetic construct
  misc_feature 1..21: note = n-mer motif encoding polynucleotide
  source 1..21: mol_type = other DNA
atgcacacaagtagaccccca

SEQ ID NO: 5641 - DNA, 21 bp, synthetic construct
  misc_feature 1..21: note = n-mer motif encoding polynucleotide
  source 1..21: mol_type = other DNA
actccaactaacgggaaccct

SEQ ID NO: 5642 - DNA, 21 bp, synthetic construct
  source 1..21: mol_type = other DNA
  misc_feature 1..21: note = n-mer motif encoding polynucleotide
acgacgtctgtggagaagact

SEQ ID NO: 5643 - DNA, 21 bp, synthetic construct
  misc_feature 1..21: note = n-mer motif encoding polynucleotide
  source 1..21: mol_type = other DNA
caatacgacgccagccgacaa

SEQ ID NO: 5644 - DNA, 21 bp, synthetic construct
  source 1..21: mol_type = other DNA
  misc_feature 1..21: note = n-mer motif encoding polynucleotide
tacaacgcccacgaatcattc

SEQ ID NO: 5645 - DNA, 21 bp, synthetic construct
  misc_feature 1..21: note = n-mer motif encoding polynucleotide
  source 1..21: mol_type = other DNA
gacaaccaacaagccctagct

SEQ ID NO: 5646 - DNA, 21 bp, synthetic construct
  misc_feature 1..21: note = n-mer motif encoding polynucleotide
  source 1..21: mol_type = other DNA
acgaagagttttaatgatctt

SEQ ID NO: 5647 - DNA, 21 bp, synthetic construct
  misc_feature 1..21: note = n-mer motif encoding polynucleotide
  source 1..21: mol_type = other DNA
ttagccgactcaaacagcaaa

SEQ ID NO: 5648 - DNA, 21 bp, synthetic construct
  source 1..21: mol_type = other DNA
  misc_feature 1..21: note = n-mer motif encoding polynucleotide
ccgagtactcatgggtatgtt

SEQ ID NO: 5649 - DNA, 21 bp, synthetic construct
  source 1..21: mol_type = other DNA
  misc_feature 1..21: note = n-mer motif encoding polynucleotide
caggttcaggggactctgggg

SEQ ID NO: 5650 - DNA, 21 bp, synthetic construct
  source 1..21: mol_type = other DNA
  misc_feature 1..21: note = n-mer motif encoding polynucleotide
ctgactgctgttgcgattagt

SEQ ID NO: 5651 - DNA, 21 bp, synthetic construct
  source 1..21: mol_type = other DNA
  misc_feature 1..21: note = n-mer motif encoding polynucleotide
aggtatgagagtactagtgct

SEQ ID NO: 5652 - DNA, 21 bp, synthetic construct
  misc_feature 1..21: note = n-mer motif encoding polynucleotide
  source 1..21: mol_type = other DNA
gcggatcataatcatattgct

SEQ ID NO: 5653 - DNA, 21 bp, synthetic construct
  source 1..21: mol_type = other DNA
  misc_feature 1..21: note = n-mer motif encoding polynucleotide
tggaatgctgagaatagtaag

SEQ ID NO: 5654 - DNA, 21 bp, synthetic construct
  source 1..21: mol_type = other DNA
  misc_feature 1..21: note = n-mer motif encoding polynucleotide
aactctgtcgtagggaacatc

SEQ ID NO: 5655 - DNA, 21 bp, synthetic construct
  source 1..21: mol_type = other DNA
  misc_feature 1..21: note = n-mer motif encoding polynucleotide
ttcggagcaaccaccacagca

SEQ ID NO: 5656 - DNA, 21 bp, synthetic construct
  misc_feature 1..21: note = n-mer motif encoding polynucleotide
  source 1..21: mol_type = other DNA
gcttcagggtctgaaatgcct

SEQ ID NO: 5657 - DNA, 21 bp, synthetic construct
  source 1..21: mol_type = other DNA
  misc_feature 1..21: note = n-mer motif encoding polynucleotide
gacggaacaaaaagcggaatg

SEQ ID NO: 5658 - DNA, 21 bp, synthetic construct
  misc_feature 1..21: note = n-mer motif encoding polynucleotide
  source 1..21: mol_type = other DNA
tacaccgccgacaaaaaacaa

SEQ ID NO: 5659 - DNA, 21 bp, synthetic construct
  misc_feature 1..21: note = n-mer motif encoding polynucleotide
  source 1..21: mol_type = other DNA
ccgattgctgagaggccttct

SEQ ID NO: 5660 - DNA, 21 bp, synthetic construct
  misc_feature 1..21: note = n-mer motif encoding polynucleotide
  source 1..21: mol_type = other DNA
agcaactcgtacttactcaac

SEQ ID NO: 5661 - DNA, 21 bp, synthetic construct
  misc_feature 1..21: note = n-mer motif encoding polynucleotide
  source 1..21: mol_type = other DNA
acgagagaattgacaaaaaac

SEQ ID NO: 5662 - DNA, 21 bp, synthetic construct
  misc_feature 1..21: note = n-mer motif encoding polynucleotide
  source 1..21: mol_type = other DNA
ctcggaaaccactacacaccc

SEQ ID NO: 5663 - DNA, 21 bp, synthetic construct
  source 1..21: mol_type = other DNA
  misc_feature 1..21: note = n-mer motif encoding polynucleotide
ttgctccaatccatagtggta

SEQ ID NO: 5664 - DNA, 21 bp, synthetic construct
  source 1..21: mol_type = other DNA
  misc_feature 1..21: note = n-mer motif encoding polynucleotide
atgatggcgaataatatgcag

SEQ ID NO: 5665 - DNA, 21 bp, synthetic construct
  misc_feature 1..21: note = n-mer motif encoding polynucleotide
  source 1..21: mol_type = other DNA
ggcgcggacacctcgacccgg

SEQ ID NO: 5666 - DNA, 21 bp, synthetic construct
  misc_feature 1..21: note = n-mer motif encoding polynucleotide
  source 1..21: mol_type = other DNA
gggttcgggcacgtgcccgaa

SEQ ID NO: 5667 - DNA, 21 bp, synthetic construct
  misc_feature 1..21: note = n-mer motif encoding polynucleotide
  source 1..21: mol_type = other DNA
aacgttatgcactcttcctcc

SEQ ID NO: 5668 - DNA, 21 bp, synthetic construct
  source 1..21: mol_type = other DNA
  misc_feature 1..21: note = n-mer motif encoding polynucleotide
tctgcgtcgaaagtggaatac

SEQ ID NO: 5669 - DNA, 21 bp, synthetic construct
  source 1..21: mol_type = other DNA
  misc_feature 1..21: note = n-mer motif encoding polynucleotide
atttcgagttatgatggtaat

SEQ ID NO: 5670 - DNA, 21 bp, synthetic construct
  misc_feature 1..21: note = n-mer motif encoding polynucleotide
  source 1..21: mol_type = other DNA
aaaaaaacgaaaacactaact

SEQ ID NO: 5671 - DNA, 21 bp, synthetic construct
  misc_feature 1..21: note = n-mer motif encoding polynucleotide
  source 1..21: mol_type = other DNA
ggtaccatattaccaaaccaa

SEQ ID NO: 5672 - DNA, 21 bp, synthetic construct
  misc_feature 1..21: note = n-mer motif encoding polynucleotide
  source 1..21: mol_type = other DNA
ttaaacgtcgtaccaacacaa

SEQ ID NO: 5673 - DNA, 21 bp, synthetic construct
  misc_feature 1..21: note = n-mer motif encoding polynucleotide
  source 1..21: mol_type = other DNA
agtagtgttacttcgagggag

SEQ ID NO: 5674 - DNA, 21 bp, synthetic construct
  misc_feature 1..21: note = n-mer motif encoding polynucleotide
  source 1..21: mol_type = other DNA
cccatcaacgtactcacgaca

SEQ ID NO: 5675 - DNA, 21 bp, synthetic construct
  misc_feature 1..21: note = n-mer motif encoding polynucleotide
  source 1..21: mol_type = other DNA
ggggataaggcgagtttggcg

SEQ ID NO: 5676 - DNA, 21 bp, synthetic construct
  source 1..21: mol_type = other DNA
  misc_feature 1..21: note = n-mer motif encoding polynucleotide
aggatgtcggagagttctgat

SEQ ID NO: 5677 - DNA, 21 bp, synthetic construct
  source 1..21: mol_type = other DNA
  misc_feature 1..21: note = n-mer motif encoding polynucleotide
aatcttttgacttcgtcgcct

SEQ ID NO: 5678 - DNA, 21 bp, synthetic construct
  source 1..21: mol_type = other DNA
  misc_feature 1..21: note = n-mer motif encoding polynucleotide
tcgcggctatcacaagacccc

SEQ ID NO: 5679 - DNA, 21 bp, synthetic construct
  misc_feature 1..21: note = n-mer motif encoding polynucleotide
  source 1..21: mol_type = other DNA
tggtcgaatgctcagagtccg

SEQ ID NO: 5680 - DNA, 21 bp, synthetic construct
  misc_feature 1..21: note = n-mer motif encoding polynucleotide
  source 1..21: mol_type = other DNA
ggcagacaccttcaatcggac

SEQ ID NO: 5681 - DNA, 21 bp, synthetic construct
  source 1..21: mol_type = other DNA
  misc_feature 1..21: note = n-mer motif encoding polynucleotide
atgagtctcgcctccacccaa

SEQ ID NO: 5682 - DNA, 21 bp, synthetic construct
  source 1..21: mol_type = other DNA
  misc_feature 1..21: note = n-mer motif encoding polynucleotide
atgagtacggttcttcgcgag

SEQ ID NO: 5683 - DNA, 21 bp, synthetic construct
  misc_feature 1..21: note = n-mer motif encoding polynucleotide
  source 1..21: mol_type = other DNA
tctaaatctgaaaacctgcaa

SEQ ID NO: 5684 - DNA, 21 bp, synthetic construct
  source 1..21: mol_type = other DNA
  misc_feature 1..21: note = n-mer motif encoding polynucleotide
tggacggaagggggctcagga

SEQ ID NO: 5685 - DNA, 21 bp, synthetic construct
  misc_feature 1..21: note = n-mer motif encoding polynucleotide
  source 1..21: mol_type = other DNA
tcgactacggtttggactgct

SEQ ID NO: 5686 - DNA, 21 bp, synthetic construct
  source 1..21: mol_type = other DNA
  misc_feature 1..21: note = n-mer motif encoding polynucleotide
gttagtttggagagtcggttg

SEQ ID NO: 5687 - DNA, 21 bp, synthetic construct
  misc_feature 1..21: note = n-mer motif encoding polynucleotide
  source 1..21: mol_type = other DNA
tctatgtatgggcaggctggg

SEQ ID NO: 5688 - DNA, 21 bp, synthetic construct
  source 1..21: mol_type = other DNA
  misc_feature 1..21: note = n-mer motif encoding polynucleotide
actaatacgcagaataatccg

SEQ ID NO: 5689 - DNA, 21 bp, synthetic construct
  misc_feature 1..21: note = n-mer motif encoding polynucleotide
  source 1..21: mol_type = other DNA
gtcggtgacaggaacttggtc

SEQ ID NO: 5690 - DNA, 21 bp, synthetic construct
  misc_feature 1..21: note = n-mer motif encoding polynucleotide
  source 1..21: mol_type = other DNA
ctcgcccacaactacttaagc

SEQ ID NO: 5691 - DNA, 21 bp, synthetic construct
  source 1..21: mol_type = other DNA
  misc_feature 1..21: note = n-mer motif encoding polynucleotide
tggacagctaaccaaggctta

SEQ ID NO: 5692 - DNA, 21 bp, synthetic construct
  source 1..21: mol_type = other DNA
  misc_feature 1..21: note = n-mer motif encoding polynucleotide
gtcttccgggaaggcatcgtg

SEQ ID NO: 5693 - DNA, 21 bp, synthetic construct
  source 1..21: mol_type = other DNA
  misc_feature 1..21: note = n-mer motif encoding polynucleotide
caggtgcagcatgagagggtg

SEQ ID NO: 5694 - DNA, 21 bp, synthetic construct
  misc_feature 1..21: note = n-mer motif encoding polynucleotide
  source 1..21: mol_type = other DNA
caaatattaaactactcagtc

SEQ ID NO: 5695 - DNA, 21 bp, synthetic construct
  source 1..21: mol_type = other DNA
  misc_feature 1..21: note = n-mer motif encoding polynucleotide
agtacgattggtaattctact

SEQ ID NO: 5696 - DNA, 21 bp, synthetic construct
  misc_feature 1..21: note = n-mer motif encoding polynucleotide
  source 1..21: mol_type = other DNA
cctatacaccacggttcatcc

SEQ ID NO: 5697 - DNA, 21 bp, synthetic construct
  source 1..21: mol_type = other DNA
  misc_feature 1..21: note = n-mer motif encoding polynucleotide
attgctactaatgtgatttat

SEQ ID NO: 5698 - DNA, 21 bp, synthetic construct
  misc_feature 1..21: note = n-mer motif encoding polynucleotide
  source 1..21: mol_type = other DNA
caaggcggtacaaacaacccc

SEQ ID NO: 5699 - DNA, 21 bp, synthetic construct
  source 1..21: mol_type = other DNA
  misc_feature 1..21: note = n-mer motif encoding polynucleotide
acccgtggcaacgacatatca

SEQ ID NO: 5700 - DNA, 21 bp, synthetic construct
  misc_feature 1..21: note = n-mer motif encoding polynucleotide
  source 1..21: mol_type = other DNA
caaacgctcatagtggggtcc

SEQ ID NO: 5701 - DNA, 21 bp, synthetic construct
  misc_feature 1..21: note = n-mer motif encoding polynucleotide
  source 1..21: mol_type = other DNA
cggggtctgcctgatgttaat

SEQ ID NO: 5702 - DNA, 21 bp, synthetic construct
  misc_feature 1..21: note = n-mer motif encoding polynucleotide
  source 1..21: mol_type = other DNA
cttaatgtgaatacgcttaat

SEQ ID NO: 5703 - DNA, 21 bp, synthetic construct
  source 1..21: mol_type = other DNA
  misc_feature 1..21: note = n-mer motif encoding polynucleotide
gggacaaaaagctggcctgtc

SEQ ID NO: 5704 - DNA, 21 bp, synthetic construct
  source 1..21: mol_type = other DNA
  misc_feature 1..21: note = n-mer motif encoding polynucleotide
acgcatcttgtgagtgattcg

SEQ ID NO: 5705 - DNA, 21 bp, synthetic construct
  source 1..21: mol_type = other DNA
  misc_feature 1..21: note = n-mer motif encoding polynucleotide
tggacgggcgcacaaccttct

SEQ ID NO: 5706 - DNA, 21 bp, synthetic construct
  misc_feature 1..21: note = n-mer motif encoding polynucleotide
  source 1..21: mol_type = other DNA
tctgcgatgcacacattagtc

SEQ ID NO: 5707 - DNA, 21 bp, synthetic construct
  source 1..21: mol_type = other DNA
  misc_feature 1..21: note = n-mer motif encoding polynucleotide
tcccaacaccacacgccactg

SEQ ID NO: 5708 - DNA, 21 bp, synthetic construct
  misc_feature 1..21: note = n-mer motif encoding polynucleotide
  source 1..21: mol_type = other DNA
gataatcggatggaggctacg

SEQ ID NO: 5709 - DNA, 21 bp, synthetic construct
  misc_feature 1..21: note = n-mer motif encoding polynucleotide
  source 1..21: mol_type = other DNA
ttgggaggaaccctgggaata

SEQ ID NO: 5710 - DNA, 21 bp, synthetic construct
  source 1..21: mol_type = other DNA
  misc_feature 1..21: note = n-mer motif encoding polynucleotide
tttcataatgagtcttatggg

SEQ ID NO: 5711 - DNA, 21 bp, synthetic construct
  misc_feature 1..21: note = n-mer motif encoding polynucleotide
  source 1..21: mol_type = other DNA
attcggacttctgtgattaat

SEQ ID NO: 5712 - DNA, 21 bp, synthetic construct
  source 1..21: mol_type = other DNA
  misc_feature 1..21: note = n-mer motif encoding polynucleotide
tataatactgttgatcagcgg

SEQ ID NO: 5713 - DNA, 21 bp, synthetic construct
  source 1..21: mol_type = other DNA
  misc_feature 1..21: note = n-mer motif encoding polynucleotide
gcgcaccaaaccgccgggcca

SEQ ID NO: 5714 - DNA, 21 bp, synthetic construct
  source 1..21: mol_type = other DNA
  misc_feature 1..21: note = n-mer motif encoding polynucleotide
cctccggaaagtgccaggggc

SEQ ID NO: 5715 - DNA, 21 bp, synthetic construct
  misc_feature 1..21: note = n-mer motif encoding polynucleotide
  source 1..21: mol_type = other DNA
aataatactttgaatattttg

SEQ ID NO: 5716 - DNA, 21 bp, synthetic construct
  source 1..21: mol_type = other DNA
  misc_feature 1..21: note = n-mer motif encoding polynucleotide
gctagttatagtagtatggtg

SEQ ID NO: 5717 - DNA, 21 bp, synthetic construct
  misc_feature 1..21: note = n-mer motif encoding polynucleotide
  source 1..21: mol_type = other DNA
tcgggtcaaaacggtacatca

SEQ ID NO: 5718 - DNA, 21 bp, synthetic construct
  misc_feature 1..21: note = n-mer motif encoding polynucleotide
  source 1..21: mol_type = other DNA
ttgtctagtatgagtacggat

SEQ ID NO: 5719 - DNA, 21 bp, synthetic construct
  source 1..21: mol_type = other DNA
  misc_feature 1..21: note = n-mer motif encoding polynucleotide
gtcgcctcgatggtacacaac

SEQ ID NO: 5720 - DNA, 21 bp, synthetic construct
  misc_feature 1..21: note = n-mer motif encoding polynucleotide
  source 1..21: mol_type = other DNA
acgcaattgtcagacggctgc

SEQ ID NO: 5721 - DNA, 21 bp, synthetic construct
  misc_feature 1..21: note = n-mer motif encoding polynucleotide
  source 1..21: mol_type = other DNA
gcgattgtggatagggggagt

SEQ ID NO: 5722 - DNA, 21 bp, synthetic construct
  misc_feature 1..21: note = n-mer motif encoding polynucleotide
  source 1..21: mol_type = other DNA
aaccgtcaaagggacttcgaa

SEQ ID NO: 5723 - DNA, 21 bp, synthetic construct
  source 1..21: mol_type = other DNA
  misc_feature 1..21: note = n-mer motif encoding polynucleotide
gcacaccaaaaagacatacgc

SEQ ID NO: 5724 - DNA, 21 bp, synthetic construct
  source 1..21: mol_type = other DNA
  misc_feature 1..21: note = n-mer motif encoding polynucleotide
ttcaccgaacgcgcactccaa

SEQ ID NO: 5725 - DNA, 21 bp, synthetic construct
  source 1..21: mol_type = other DNA
  misc_feature 1..21: note = n-mer motif encoding polynucleotide
atgctgtctcatggtgcgctt

SEQ ID NO: 5726 - DNA, 21 bp, synthetic construct
  misc_feature 1..21: note = n-mer motif encoding polynucleotide
  source 1..21: mol_type = other DNA
tccgtaaccaacggagcggaa

SEQ ID NO: 5727 - DNA, 21 bp, synthetic construct
  source 1..21: mol_type = other DNA
  misc_feature 1..21: note = n-mer motif encoding polynucleotide
atcaccgccgcgtcaccgcaa

SEQ ID NO: 5728 - DNA, 21 bp, synthetic construct
  misc_feature 1..21: note = n-mer motif encoding polynucleotide
  source 1..21: mol_type = other DNA
caaaacacgcaacgatacttg

SEQ ID NO: 5729 - DNA, 21 bp, synthetic construct
  misc_feature 1..21: note = n-mer motif encoding polynucleotide
  source 1..21: mol_type = other DNA
actggccaaggattctcggca

SEQ ID NO: 5730 - DNA, 21 bp, synthetic construct
  source 1..21: mol_type = other DNA
  misc_feature 1..21: note = n-mer motif encoding polynucleotide
agttttgagaagaatggtatt

SEQ ID NO: 5731 - DNA, 21 bp, synthetic construct
  misc_feature 1..21: note = n-mer motif encoding polynucleotide
  source 1..21: mol_type = other DNA
ctcacgtcccactctgcgggc

SEQ ID NO: 5732 - DNA, 21 bp, synthetic construct
  source 1..21: mol_type = other DNA
  misc_feature 1..21: note = n-mer motif encoding polynucleotide
tctacaatcggcaacagcacg

SEQ ID NO: 5733 - DNA, 21 bp, synthetic construct
  source 1..21: mol_type = other DNA
  misc_feature 1..21: note = n-mer motif encoding polynucleotide
ggtcttagtcggaatgatggt

SEQ ID NO: 5734 - DNA, 21 bp, synthetic construct
  source 1..21: mol_type = other DNA
  misc_feature 1..21: note = n-mer motif encoding polynucleotide
tcgacgacgcacccttccgaa

SEQ ID NO: 5735 - DNA, 21 bp, synthetic construct
  misc_feature 1..21: note = n-mer motif encoding polynucleotide
  source 1..21: mol_type = other DNA
ccaagtacgaacgaaagccgc

SEQ ID NO: 5736 - DNA, 21 bp, synthetic construct
  source 1..21: mol_type = other DNA
  misc_feature 1..21: note = n-mer motif encoding polynucleotide
ggtacgaaggatattctgatt

SEQ ID NO: 5737 - DNA, 21 bp, synthetic construct
  misc_feature 1..21: note = n-mer motif encoding polynucleotide
  source 1..21: mol_type = other DNA
tctactattaatatgcgtgcg

SEQ ID NO: 5738 - DNA, 21 bp, synthetic construct
  source 1..21: mol_type = other DNA
  misc_feature 1..21: note = n-mer motif encoding polynucleotide
tatattgctgggggggagcag

SEQ ID NO: 5739 - DNA, 21 bp, synthetic construct
  misc_feature 1..21: note = n-mer motif encoding polynucleotide
  source 1..21: mol_type = other DNA
tccagcggccaaccgctcgtc

SEQ ID NO: 5740 - DNA, 21 bp, synthetic construct
  source 1..21: mol_type = other DNA
  misc_feature 1..21: note = n-mer motif encoding polynucleotide
gacaaacaacaaaccggacaa

SEQ ID NO: 5741 - DNA, 21 bp, synthetic construct
  misc_feature 1..21: note = n-mer motif encoding polynucleotide
  source 1..21: mol_type = other DNA
gggctaggacaaccccaactc

SEQ ID NO: 5742 - DNA, 21 bp, synthetic construct
  source 1..21: mol_type = other DNA
  misc_feature 1..21: note = n-mer motif encoding polynucleotide
agtccgcagcatggtgttatt

SEQ ID NO: 5743 - DNA, 21 bp, synthetic construct
  misc_feature 1..21: note = n-mer motif encoding polynucleotide
  source 1..21: mol_type = other DNA
tataggggtagggaggattgg

SEQ ID NO: 5744 - DNA, 21 bp, synthetic construct
  source 1..21: mol_type = other DNA
  misc_feature 1..21: note = n-mer motif encoding polynucleotide
gcggggggtttgctgtcgcgg

SEQ ID NO: 5745 - DNA, 21 bp, synthetic construct
  misc_feature 1..21: note = n-mer motif encoding polynucleotide
  source 1..21: mol_type = other DNA
ccgatacaacaagcctcattg

SEQ ID NO: 5746 - DNA, 21 bp, synthetic construct
  source 1..21: mol_type = other DNA
  misc_feature 1..21: note = n-mer motif encoding polynucleotide
tggagcgccggcgaacgggtg

SEQ ID NO: 5747 - DNA, 21 bp, synthetic construct
  source 1..21: mol_type = other DNA
  misc_feature 1..21: note = n-mer motif encoding polynucleotide
aggggtgatgttgctacgacg

SEQ ID NO: 5748 - DNA, 21 bp, synthetic construct
  source 1..21: mol_type = other DNA
  misc_feature 1..21: note = n-mer motif encoding polynucleotide
ttaacgggacaaaacgaattc

SEQ ID NO: 5749 - DNA, 21 bp, synthetic construct
  misc_feature 1..21: note = n-mer motif encoding polynucleotide
  source 1..21: mol_type = other DNA
acgacgccgcctttttctaat

SEQ ID NO: 5750 - DNA, 21 bp, synthetic construct
  source 1..21: mol_type = other DNA
  misc_feature 1..21: note = n-mer motif encoding polynucleotide
acgagtattggtagtgctaag

SEQ ID NO: 5751 - DNA, 21 bp, synthetic construct
  misc_feature 1..21: note = n-mer motif encoding polynucleotide
  source 1..21: mol_type = other DNA
aatgtgcagaatgtgcctggg

SEQ ID NO: 5752 - DNA, 21 bp, synthetic construct
  misc_feature 1..21: note = n-mer motif encoding polynucleotide
  source 1..21: mol_type = other DNA
tatacgggtactcttgttgtt

SEQ ID NO: 5753 - DNA, 21 bp, synthetic construct
  source 1..21: mol_type = other DNA
  misc_feature 1..21: note = n-mer motif encoding polynucleotide
ggaacccacgcctcagcatac

SEQ ID NO: 5754 - DNA, 21 bp, synthetic construct
  source 1..21: mol_type = other DNA
  misc_feature 1..21: note = n-mer motif encoding polynucleotide
ctggttgtttcgaatagtctg

SEQ ID NO: 5755 - DNA, 21 bp, synthetic construct
  source 1..21: mol_type = other DNA
  misc_feature 1..21: note = n-mer motif encoding polynucleotide
acgcatcttgtgagggattcg

SEQ ID NO: 5756 - DNA, 21 bp, synthetic construct
  source 1..21: mol_type = other DNA
  misc_feature 1..21: note = n-mer motif encoding polynucleotide
aatcatggtcgtgctattgat

SEQ ID NO: 5757 - DNA, 21 bp, synthetic construct
  misc_feature 1..21: note = n-mer motif encoding polynucleotide
  source 1..21: mol_type = other DNA
cccaaaactctaacttcgaca

SEQ ID NO: 5758 - DNA, 21 bp, synthetic construct
  source 1..21: mol_type = other DNA
  misc_feature 1..21: note = n-mer motif encoding polynucleotide
ttcggtatagggcacggaaca

SEQ ID NO: 5759 - DNA, 21 bp, synthetic construct
  misc_feature 1..21: note = n-mer motif encoding polynucleotide
  source 1..21: mol_type = other DNA
gcgcttccgtctcgtgagcgg

SEQ ID NO: 5760 - DNA, 21 bp, synthetic construct
  misc_feature 1..21: note = n-mer motif encoding polynucleotide
  source 1..21: mol_type = other DNA
gcgactaggggtgagtcgtct

SEQ ID NO: 5761 - DNA, 21 bp, synthetic construct
  misc_feature 1..21: note = n-mer motif encoding polynucleotide
  source 1..21: mol_type = other DNA
gggacaaccgaagttaacaaa

SEQ ID NO: 5762 - DNA, 21 bp, synthetic construct
  misc_feature 1..21: note = n-mer motif encoding polynucleotide
  source 1..21: mol_type = other DNA
acccacacccttgggggaaca

SEQ ID NO: 5763 - DNA, 21 bp, synthetic construct
  misc_feature 1..21: note = n-mer motif encoding polynucleotide
  source 1..21: mol_type = other DNA
gaagcagtaacaagtaaatgg

SEQ ID NO: 5764 - DNA, 21 bp, synthetic construct
  misc_feature 1..21: note = n-mer motif encoding polynucleotide
  source 1..21: mol_type = other DNA
cactacggtaacaaagacata

SEQ ID NO: 5765 - DNA, 21 bp, synthetic construct
  source 1..21: mol_type = other DNA
  misc_feature 1..21: note = n-mer motif encoding polynucleotide
atttctacgcatacgatgacg

SEQ ID NO: 5766 - DNA, 21 bp, synthetic construct
  source 1..21: mol_type = other DNA
  misc_feature 1..21: note = n-mer motif encoding polynucleotide
gatacgtataatagtaatact

SEQ ID NO: 5767 - DNA, 21 bp, synthetic construct
  misc_feature 1..21: note = n-mer motif encoding polynucleotide
  source 1..21: mol_type = other DNA
gtttttactgggcagacggag

SEQ ID NO: 5768 - DNA, 21 bp, synthetic construct
  source 1..21: mol_type = other DNA
  misc_feature 1..21: note = n-mer motif encoding polynucleotide
tcggtcaccagtggaacacaa

SEQ ID NO: 5769 - DNA, 21 bp, synthetic construct
  misc_feature 1..21: note = n-mer motif encoding polynucleotide
  source 1..21: mol_type = other DNA
catacgtattcgcaggctgat

SEQ ID NO: 5770 - DNA, 21 bp, synthetic construct
  misc_feature 1..21: note = n-mer motif encoding polynucleotide
  source 1..21: mol_type = other DNA
gtagcgggcttagtcgacata

SEQ ID NO: 5771 - DNA, 21 bp, synthetic construct
  source 1..21: mol_type = other DNA
  misc_feature 1..21: note = n-mer motif encoding polynucleotide
gactctaccaaagccatgcaa

SEQ ID NO: 5772 - DNA, 21 bp, synthetic construct
  misc_feature 1..21: note = n-mer motif encoding polynucleotide
  source 1..21: mol_type = other DNA
gaggggcataatcgtggtatt

SEQ ID NO: 5773 - DNA, 21 bp, synthetic construct
  source 1..21: mol_type = other DNA
  misc_feature 1..21: note = n-mer motif encoding polynucleotide
gggttgcatgggacgagtaat

SEQ ID NO: 5774 - DNA, 21 bp, synthetic construct
  source 1..21: mol_type = other DNA
  misc_feature 1..21: note = n-mer motif encoding polynucleotide
ccgctttctcttcataatagt

SEQ ID NO: 5775 - DNA, 21 bp, synthetic construct
  misc_feature 1..21: note = n-mer motif encoding polynucleotide
  source 1..21: mol_type = other DNA
gcgagtgataagggggcgaat

SEQ ID NO: 5776 - DNA, 21 bp, synthetic construct
  source 1..21: mol_type = other DNA
  misc_feature 1..21: note = n-mer motif encoding polynucleotide
gtgctgttgcagaattctcat

SEQ ID NO: 5777 - DNA, 21 bp, synthetic construct
  source 1..21: mol_type = other DNA
  misc_feature 1..21: note = n-mer motif encoding polynucleotide
ctatacgacggaaaacacgtc

SEQ ID NO: 5778 - DNA, 21 bp, synthetic construct
  misc_feature 1..21: note = n-mer motif encoding polynucleotide
  source 1..21: mol_type = other DNA
acccaaggatctaacaccaca

SEQ ID NO: 5779 - DNA, 21 bp, synthetic construct
  misc_feature 1..21: note = n-mer motif encoding polynucleotide
  source 1..21: mol_type = other DNA
ttcctcgacaaatacaactac

SEQ ID NO: 5780 - DNA, 21 bp, synthetic construct
  misc_feature 1..21: note = n-mer motif encoding polynucleotide
  source 1..21: mol_type = other DNA
gacaccggaatcaaaaacgtt

SEQ ID NO: 5781 - DNA, 21 bp, synthetic construct
  source 1..21: mol_type = other DNA
  misc_feature 1..21: note = n-mer motif encoding polynucleotide
tccggagcggcacaaaaccca

SEQ ID NO: 5782 - DNA, 21 bp, synthetic construct
  source 1..21: mol_type = other DNA
  misc_feature 1..21: note = n-mer motif encoding polynucleotide
accctccacaccaaagaccta

SEQ ID NO: 5783 - DNA, 21 bp, synthetic construct
  source 1..21: mol_type = other DNA
  misc_feature 1..21: note = n-mer motif encoding polynucleotide
gctacttacgttgtcggaaca

SEQ ID NO: 5784 - DNA, 21 bp, synthetic construct
  misc_feature 1..21: note = n-mer motif encoding polynucleotide
  source 1..21: mol_type = other DNA
cttgtggggactttggtgtat

SEQ ID NO: 5785 - DNA, 21 bp, synthetic construct
  source 1..21: mol_type = other DNA
  misc_feature 1..21: note = n-mer motif encoding polynucleotide
tctaatacgactgtgcagctt

SEQ ID NO: 5786 - DNA, 21 bp, synthetic construct
  misc_feature 1..21: note = n-mer motif encoding polynucleotide
  source 1..21: mol_type = other DNA
aaggctcagattaatcagatg

SEQ ID NO: 5787 - DNA, 21 bp, synthetic construct
  misc_feature 1..21: note = n-mer motif encoding polynucleotide
  source 1..21: mol_type = other DNA
cggaatgctactgtgactgtt

SEQ ID NO: 5788 - DNA, 21 bp, synthetic construct
  source 1..21: mol_type = other DNA
  misc_feature 1..21: note = n-mer motif encoding polynucleotide
gcaaccagagtgggcaaccac

SEQ ID NO: 5789 - DNA, 21 bp, synthetic construct
  source 1..21: mol_type = other DNA
  misc_feature 1..21: note = n-mer motif encoding polynucleotide
agttatcagaatcctccgcct

SEQ ID NO: 5790 - DNA, 21 bp, synthetic construct
  source 1..21: mol_type = other DNA
  misc_feature 1..21: note = n-mer motif encoding polynucleotide
tttgatagttataatattgtg

SEQ ID NO: 5791 - DNA, 21 bp, synthetic construct
  source 1..21: mol_type = other DNA
  misc_feature 1..21: note = n-mer motif encoding polynucleotide
gctactctttctccgcatgct

SEQ ID NO: 5792 - DNA, 21 bp, synthetic construct
  source 1..21: mol_type = other DNA
  misc_feature 1..21: note = n-mer motif encoding polynucleotide
tgggagagtccgactaatgcg

SEQ ID NO: 5793 - DNA, 21 bp, synthetic construct
  source 1..21: mol_type = other DNA
  misc_feature 1..21: note = n-mer motif encoding polynucleotide
atcgaaaacgtaaaccacttg

SEQ ID NO: 5794 - DNA, 21 bp, synthetic construct
  misc_feature 1..21: note = n-mer motif encoding polynucleotide
  source 1..21: mol_type = other DNA
tatcgggcttcggatgtggcg

SEQ ID NO: 5795 - DNA, 21 bp, synthetic construct
  source 1..21: mol_type = other DNA
  misc_feature 1..21: note = n-mer motif encoding polynucleotide
catatgtcttctgttgcgact

SEQ ID NO: 5796 - DNA, 21 bp, synthetic construct
  source 1..21: mol_type = other DNA
  misc_feature 1..21: note = n-mer motif encoding polynucleotide
atccaaagagacgtgggccac

SEQ ID NO: 5797 - DNA, 21 bp, synthetic construct
  misc_feature 1..21: note = n-mer motif encoding polynucleotide
  source 1..21: mol_type = other DNA
gagagtgttagggagactatt

SEQ ID NO: 5798 - DNA, 21 bp, synthetic construct
  misc_feature 1..21: note = n-mer motif encoding polynucleotide
  source 1..21: mol_type = other DNA
cagggggggaatagtcggttt

SEQ ID NO: 5799 - DNA, 21 bp, synthetic construct
  source 1..21: mol_type = other DNA
  misc_feature 1..21: note = n-mer motif encoding polynucleotide
gaaaaaggcacaccaagtagc

SEQ ID NO: 5800 - DNA, 21 bp, synthetic construct
  misc_feature 1..21: note = n-mer motif encoding polynucleotide
  source 1..21: mol_type = other DNA
cacgacagcacaacccgccca

SEQ ID NO: 5801 - DNA, 21 bp, synthetic construct
  misc_feature 1..21: note = n-mer motif encoding polynucleotide
  source 1..21: mol_type = other DNA
ttaccaacaggcgtcctgccc

SEQ ID NO: 5802 - DNA, 21 bp, synthetic construct
  source 1..21: mol_type = other DNA
  misc_feature 1..21: note = n-mer motif encoding polynucleotide
accctaggctacccagacaaa

SEQ ID NO: 5803 - DNA, 21 bp, synthetic construct
  source 1..21: mol_type = other DNA
  misc_feature 1..21: note = n-mer motif encoding polynucleotide
gctaacaccgtcacagaacga

SEQ ID NO: 5804 - DNA, 21 bp, synthetic construct
  source 1..21: mol_type = other DNA
  misc_feature 1..21: note = n-mer motif encoding polynucleotide
cacgacaaatctatccaacca

SEQ ID NO: 5805 - DNA, 21 bp, synthetic construct
  source 1..21: mol_type = other DNA
  misc_feature 1..21: note = n-mer motif encoding polynucleotide
ggaggaacagcccttgggagc

SEQ ID NO: 5806 - DNA, 21 bp, synthetic construct
  source 1..21: mol_type = other DNA
  misc_feature 1..21: note = n-mer motif encoding polynucleotide
gggggtaactaccacaccact

SEQ ID NO: 5807 - DNA, 21 bp, synthetic construct
  misc_feature 1..21: note = n-mer motif encoding polynucleotide
  source 1..21: mol_type = other DNA
atctcagaaatgactaggtac

SEQ ID NO: 5808 - DNA, 21 bp, synthetic construct
  misc_feature 1..21: note = n-mer motif encoding polynucleotide
  source 1..21: mol_type = other DNA
gttgaatctaaatccgaacca

SEQ ID NO: 5809 - DNA, 21 bp, synthetic construct
  source 1..21: mol_type = other DNA
  misc_feature 1..21: note = n-mer motif encoding polynucleotide
gaccgtgcccaaaacaacgaa

SEQ ID NO: 5810 - DNA, 21 bp, synthetic construct
  misc_feature 1..21: note = n-mer motif encoding polynucleotide
  source 1..21: mol_type = other DNA
acggcgcagaccggctgggtt

SEQ ID NO: 5811 - DNA, 21 bp, synthetic construct
  source 1..21: mol_type = other DNA
  misc_feature 1..21: note = n-mer motif encoding polynucleotide
gggttcgggcacctgcccgaa

SEQ ID NO: 5812 - DNA, 21 bp, synthetic construct
  misc_feature 1..21: note = n-mer motif encoding polynucleotide
  source 1..21: mol_type = other DNA
cctattacgggttttagtgtt

SEQ ID NO: 5813 - DNA, 21 bp, synthetic construct
  misc_feature 1..21: note = n-mer motif encoding polynucleotide
  source 1..21: mol_type = other DNA
gataggacgtattcgaatacg

SEQ ID NO: 5814 - DNA, 21 bp, synthetic construct
  source 1..21: mol_type = other DNA
  misc_feature 1..21: note = n-mer motif encoding polynucleotide
atgtcaaacgcctcctacata

SEQ ID NO: 5815 - DNA, 21 bp, synthetic construct
  misc_feature 1..21: note = n-mer motif encoding polynucleotide
  source 1..21: mol_type = other DNA
gataatagtaggcctgaggtg

SEQ ID NO: 5816 - DNA, 21 bp, synthetic construct
  misc_feature 1..21: note = n-mer motif encoding polynucleotide
  source 1..21: mol_type = other DNA
tcaagttcccaaacggttttg

SEQ ID NO: 5817 - DNA, 21 bp, synthetic construct
  source 1..21: mol_type = other DNA
  misc_feature 1..21: note = n-mer motif encoding polynucleotide
agtaatcttgatggtactatt

SEQ ID NO: 5818 - DNA, 21 bp, synthetic construct
  misc_feature 1..21: note = n-mer motif encoding polynucleotide
  source 1..21: mol_type = other DNA
agtaatatgcgtgaggagatt

SEQ ID NO: 5819 - DNA, 21 bp, synthetic construct
  misc_feature 1..21: note = n-mer motif encoding polynucleotide
  source 1..21: mol_type = other DNA
agacttacagaactggtcata

SEQ ID NO: 5820 - DNA, 21 bp, synthetic construct
  misc_feature 1..21: note = n-mer motif encoding polynucleotide
  source 1..21: mol_type = other DNA
caggttagtctggtgaagttg

SEQ ID NO: 5821 - DNA, 21 bp, synthetic construct
  misc_feature 1..21: note = n-mer motif encoding polynucleotide
  source 1..21: mol_type = other DNA
gaaatacacacgaccacaggc

SEQ ID NO: 5822 - DNA, 21 bp, synthetic construct
  source 1..21: mol_type = other DNA
  misc_feature 1..21: note = n-mer motif encoding polynucleotide
agcaggatagaaaacaacaac

SEQ ID NO: 5823 - DNA, 21 bp, synthetic construct
  source 1..21: mol_type = other DNA
  misc_feature 1..21: note = n-mer motif encoding polynucleotide
ggaacaggcaaagaagttcga

SEQ ID NO: 5824 - DNA, 21 bp, synthetic construct
  source 1..21: mol_type = other DNA
  misc_feature 1..21: note = n-mer motif encoding polynucleotide
tggcaggatcataataaggtg

SEQ ID NO: 5825 - DNA, 21 bp, synthetic construct
  source 1..21: mol_type = other DNA
  misc_feature 1..21: note = n-mer motif encoding polynucleotide
tcgacaaactctataggcgcc

SEQ ID NO: 5826 - DNA, 21 bp, synthetic construct
  misc_feature 1..21: note = n-mer motif encoding polynucleotide
  source 1..21: mol_type = other DNA
tccgaattaatggtcagaccc

SEQ ID NO: 5827 - DNA, 21 bp, synthetic construct
  misc_feature 1..21: note = n-mer motif encoding polynucleotide
  source 1..21: mol_type = other DNA
ccgcttcagaataataagacg

SEQ ID NO: 5828 - DNA, 21 bp, synthetic construct
  misc_feature 1..21: note = n-mer motif encoding polynucleotide
  source 1..21: mol_type = other DNA
ccttatgcgaataggcttgag

SEQ ID NO: 5829 - DNA, 21 bp, synthetic construct
  source 1..21: mol_type = other DNA
  misc_feature 1..21: note = n-mer motif encoding polynucleotide
gggacggtttcgcttattcct

SEQ ID NO: 5830 - DNA, 21 bp, synthetic construct
  misc_feature 1..21: note = n-mer motif encoding polynucleotide
  source 1..21: mol_type = other DNA
gatgtttatcttaagagtccg

SEQ ID NO: 5831 - DNA, 21 bp, synthetic construct
  source 1..21: mol_type = other DNA
  misc_feature 1..21: note = n-mer motif encoding polynucleotide
ttgccggataaggggcggatt

SEQ ID NO: 5832 - DNA, 21 bp, synthetic construct
  source 1..21: mol_type = other DNA
  misc_feature 1..21: note = n-mer motif encoding polynucleotide
tcgataacgaccgtagcgaac

SEQ ID NO: 5833 - DNA, 21 bp, synthetic construct
  misc_feature 1..21: note = n-mer motif encoding polynucleotide
  source 1..21: mol_type = other DNA
ccgcttcaatcccaatcggga

SEQ ID NO: 5834 - DNA, 21 bp, synthetic construct
  misc_feature 1..21: note = n-mer motif encoding polynucleotide
  source 1..21: mol_type = other DNA
aataatatgggtcatggtcat

SEQ ID NO: 5835 - DNA, 21 bp, synthetic construct
  source 1..21: mol_type = other DNA
  misc_feature 1..21: note = n-mer motif encoding polynucleotide
agcggacaaaaaaactcagaa

SEQ ID NO: 5836 - DNA, 21 bp, synthetic construct
  source 1..21: mol_type = other DNA
  misc_feature 1..21: note = n-mer motif encoding polynucleotide
accgaagcgggccgcccccaa

SEQ ID NO: 5837 - DNA, 21 bp, synthetic construct
  misc_feature 1..21: note = n-mer motif encoding polynucleotide
  source 1..21: mol_type = other DNA
accttacacacgaaagacttg

SEQ ID NO: 5838 - DNA, 21 bp, synthetic construct
  source 1..21: mol_type = other DNA
  misc_feature 1..21: note = n-mer motif encoding polynucleotide
cttcgagacctaaacggagga

SEQ ID NO: 5839 - DNA, 21 bp, synthetic construct
  misc_feature 1..21: note = n-mer motif encoding polynucleotide
  source 1..21: mol_type = other DNA
gtttgtgttactacttgtgct

SEQ ID NO: 5840 - DNA, 21 bp, synthetic construct
  misc_feature 1..21: note = n-mer motif encoding polynucleotide
  source 1..21: mol_type = other DNA
gtcacagctgctcaaccccaa

SEQ ID NO: 5841 - DNA, 21 bp, synthetic construct
  misc_feature 1..21: note = n-mer motif encoding polynucleotide
  source 1..21: mol_type = other DNA
gcgacttttagtcatgctggt

SEQ ID NO: 5842 - DNA, 21 bp, synthetic construct
  misc_feature 1..21: note = n-mer motif encoding polynucleotide
  source 1..21: mol_type = other DNA
acttatgcgcctaggtcgcct

SEQ ID NO: 5843 - DNA, 21 bp, synthetic construct
  source 1..21: mol_type = other DNA
  misc_feature 1..21: note = n-mer motif encoding polynucleotide
acgtcggagatgcgtactgct

SEQ ID NO: 5844 - DNA, 21 bp, synthetic construct
  misc_feature 1..21: note = n-mer motif encoding polynucleotide
  source 1..21: mol_type = other DNA
tactcgacaaccatgcttaac

SEQ ID NO: 5845 - DNA, 21 bp, synthetic construct
  source 1..21: mol_type = other DNA
  misc_feature 1..21: note = n-mer motif encoding polynucleotide
tctttcacgaacacaaaccca

SEQ ID NO: 5846 - DNA, 21 bp, synthetic construct
  source 1..21: mol_type = other DNA
  misc_feature 1..21: note = n-mer motif encoding polynucleotide
agtcctcctagtacgtcgggt

SEQ ID NO: 5847 - DNA, 21 bp, synthetic construct
  misc_feature 1..21: note = n-mer motif encoding polynucleotide
  source 1..21: mol_type = other DNA
gtgacgactgttgatagtgct

SEQ ID NO: 5848 - DNA, 21 bp, synthetic construct
  misc_feature 1..21: note = n-mer motif encoding polynucleotide
  source 1..21: mol_type = other DNA
gaggcgcataatcgtgttatt

SEQ ID NO: 5849 - DNA, 21 bp, synthetic construct
  misc_feature 1..21: note = n-mer motif encoding polynucleotide
  source 1..21: mol_type = other DNA
atggagttgacttctactagt

SEQ ID NO: 5850 - DNA, 21 bp, synthetic construct
  misc_feature 1..21: note = n-mer motif encoding polynucleotide
  source 1..21: mol_type = other DNA
catttggttactagtggtatt

SEQ ID NO: 5851 - DNA, 21 bp, synthetic construct
  source 1..21: mol_type = other DNA
  misc_feature 1..21: note = n-mer motif encoding polynucleotide
caaaccatcacctcacaaatg

SEQ ID NO: 5852 - DNA, 21 bp, synthetic construct
  source 1..21: mol_type = other DNA
  misc_feature 1..21: note = n-mer motif encoding polynucleotide
actgcgaatagtacgtatgtg

SEQ ID NO: 5853 - DNA, 21 bp, synthetic construct
  misc_feature 1..21: note = n-mer motif encoding polynucleotide
  source 1..21: mol_type = other DNA
cttatccaattatcgggtcaa

SEQ ID NO: 5854 - DNA, 21 bp, synthetic construct
  source 1..21: mol_type = other DNA
  misc_feature 1..21: note = n-mer motif encoding polynucleotide
tcttacgttagcgtccccgcc

SEQ ID NO: 5855 - DNA, 21 bp, synthetic construct
  source 1..21: mol_type = other DNA
  misc_feature 1..21: note = n-mer motif encoding polynucleotide
gtgcatgggaatgctccggct

SEQ ID NO: 5856 - DNA, 21 bp, synthetic construct
  misc_feature 1..21: note = n-mer motif encoding polynucleotide
  source 1..21: mol_type = other DNA
gccggaaaaacccacgccgac

SEQ ID NO: 5857 - DNA, 21 bp, synthetic construct
  source 1..21: mol_type = other DNA
  misc_feature 1..21: note = n-mer motif encoding polynucleotide
acattccaccaaggggtcaaa

SEQ ID NO: 5858 - DNA, 21 bp, synthetic construct
  source 1..21: mol_type = other DNA
  misc_feature 1..21: note = n-mer motif encoding polynucleotide
ttaggaaacaaccggccacta

SEQ ID NO: 5859 - DNA, 21 bp, synthetic construct
  misc_feature 1..21: note = n-mer motif encoding polynucleotide
  source 1..21: mol_type = other DNA
ctgcacctcgtccggagcttc

SEQ ID NO: 5860 - DNA, 21 bp, synthetic construct
  misc_feature 1..21: note = n-mer motif encoding polynucleotide
  source 1..21: mol_type = other DNA
tcctacagtacttcaacaccg

SEQ ID NO: 5861 - DNA, 21 bp, synthetic construct
  misc_feature 1..21: note = n-mer motif encoding polynucleotide
  source 1..21: mol_type = other DNA
atatcgcaaggctcgagcctc

SEQ ID NO: 5862 - DNA, 21 bp, synthetic construct
  misc_feature 1..21: note = n-mer motif encoding polynucleotide
  source 1..21: mol_type = other DNA
ctccaactggctacatcccac

SEQ ID NO: 5863 - DNA, 21 bp, synthetic construct
  source 1..21: mol_type = other DNA
  misc_feature 1..21: note = n-mer motif encoding polynucleotide
gtgactcagcggtttgctgag

SEQ ID NO: 5864 - DNA, 21 bp, synthetic construct
  source 1..21: mol_type = other DNA
  misc_feature 1..21: note = n-mer motif encoding polynucleotide
gctatagactccatcaaaatg

SEQ ID NO: 5865 - DNA, 21 bp, synthetic construct
  misc_feature 1..21: note = n-mer motif encoding polynucleotide
  source 1..21: mol_type = other DNA
gacgcacacactttcagccgg

SEQ ID NO: 5866 - DNA, 21 bp, synthetic construct
  source 1..21: mol_type = other DNA
  misc_feature 1..21: note = n-mer motif encoding polynucleotide
cgtggttcagacggaggattg

SEQ ID NO: 5867 - DNA, 21 bp, synthetic construct
  misc_feature 1..21: note = n-mer motif encoding polynucleotide
  source 1..21: mol_type = other DNA
ttagcacaaggcacggaccgg

SEQ ID NO: 5868 - DNA, 21 bp, synthetic construct
  source 1..21: mol_type = other DNA
  misc_feature 1..21: note = n-mer motif encoding polynucleotide
aaaaacaacaactcagacagt

SEQ ID NO: 5869 - DNA, 21 bp, synthetic construct
  source 1..21: mol_type = other DNA
  misc_feature 1..21: note = n-mer motif encoding polynucleotide
gaaaacgaaaaacgagaaagc

SEQ ID NO: 5870 - DNA, 21 bp, synthetic construct
  source 1..21: mol_type = other DNA
  misc_feature 1..21: note = n-mer motif encoding polynucleotide
aacgaacaattcgaaaaagtc

SEQ ID NO: 5871 - DNA, 21 bp, synthetic construct
  source 1..21: mol_type = other DNA
  misc_feature 1..21: note = n-mer motif encoding polynucleotide
acacaagtagtcgcaagaaca

SEQ ID NO: 5872 - DNA, 21 bp, synthetic construct
  misc_feature 1..21: note = n-mer motif encoding polynucleotide
  source 1..21: mol_type = other DNA
ggagtaaacgtcaccaacagc

SEQ ID NO: 5873 - DNA, 21 bp, synthetic construct
  source 1..21: mol_type = other DNA
  misc_feature 1..21: note = n-mer motif encoding polynucleotide
gccgacaaaggattcggccac

SEQ ID NO: 5874 - DNA, 21 bp, synthetic construct
  source 1..21: mol_type = other DNA
  misc_feature 1..21: note = n-mer motif encoding polynucleotide
actcataagcaggtggatctt

SEQ ID NO: 5875 - DNA, 21 bp, synthetic construct
  misc_feature 1..21: note = n-mer motif encoding polynucleotide
  source 1..21: mol_type = other DNA
tcggctaacttatacaaacaa

SEQ ID NO: 5876 - DNA, 21 bp, synthetic construct
  misc_feature 1..21: note = n-mer motif encoding polynucleotide
  source 1..21: mol_type = other DNA
aagctgcatactaaggatctt

SEQ ID NO: 5877 - DNA, 21 bp, synthetic construct
  misc_feature 1..21: note = n-mer motif encoding polynucleotide
  source 1..21: mol_type = other DNA
gtggtggttcacactatccca

SEQ ID NO: 5878 - DNA, 21 bp, synthetic construct
  source 1..21: mol_type = other DNA
  misc_feature 1..21: note = n-mer motif encoding polynucleotide
tctacgtctcaggctgtgcag

SEQ ID NO: 5879 - DNA, 21 bp, synthetic construct
  misc_feature 1..21: note = n-mer motif encoding polynucleotide
  source 1..21: mol_type = other DNA
cgtaacggctccgcccaaagc

SEQ ID NO: 5880 - DNA, 21 bp, synthetic construct
  source 1..21: mol_type = other DNA
  misc_feature 1..21: note = n-mer motif encoding polynucleotide
cattatgggaataaggatatt

SEQ ID NO: 5881 - DNA, 21 bp, synthetic construct
  source 1..21: mol_type = other DNA
  misc_feature 1..21: note = n-mer motif encoding polynucleotide
agcttcttggtagcccaccca

SEQ ID NO: 5882 - DNA, 21 bp, synthetic construct
  source 1..21: mol_type = other DNA
  misc_feature 1..21: note = n-mer motif encoding polynucleotide
cagcagaatacgagtttgccg

SEQ ID NO: 5883 - DNA, 21 bp, synthetic construct
  misc_feature 1..21: note = n-mer motif encoding polynucleotide
  source 1..21: mol_type = other DNA
atgcacgtcgacaaaacgagt

SEQ ID NO: 5884 - DNA, 21 bp, synthetic construct
  source 1..21: mol_type = other DNA
  misc_feature 1..21: note = n-mer motif encoding polynucleotide
aataatgagaatacgcgtaat

SEQ ID NO: 5885 - DNA, 21 bp, synthetic construct
  misc_feature 1..21: note = n-mer motif encoding polynucleotide
  source 1..21: mol_type = other DNA
tcgataaacaacataggcgca

SEQ ID NO: 5886 - DNA, 21 bp, synthetic construct
  source 1..21: mol_type = other DNA
  misc_feature 1..21: note = n-mer motif encoding polynucleotide
gctactatatcggaccgagcc

SEQ ID NO: 5887 - DNA, 21 bp, synthetic construct
  source 1..21: mol_type = other DNA
  misc_feature 1..21: note = n-mer motif encoding polynucleotide
tactcaaacctcgtactttcc

SEQ ID NO: 5888 - DNA, 21 bp, synthetic construct
  misc_feature 1..21: note = n-mer motif encoding polynucleotide
  source 1..21: mol_type = other DNA
atgatgaatgtgagtggtcat

SEQ ID NO: 5889 - DNA, 21 bp, synthetic construct
  misc_feature 1..21: note = n-mer motif encoding polynucleotide
  source 1..21: mol_type = other DNA
ggggagacgcggtcgactgct

SEQ ID NO: 5890 - DNA, 21 bp, synthetic construct
  misc_feature 1..21: note = n-mer motif encoding polynucleotide
  source 1..21: mol_type = other DNA
acgaagggttataatgatctt

SEQ ID NO: 5891 - DNA, 21 bp, synthetic construct
  misc_feature 1..21: note = n-mer motif encoding polynucleotide
  source 1..21: mol_type = other DNA
gcgtataatatgtcgtctgtt

SEQ ID NO: 5892 - DNA, 21 bp, synthetic construct
  source 1..21: mol_type = other DNA
  misc_feature 1..21: note = n-mer motif encoding polynucleotide
gcagaccccgctaaaggcaaa

SEQ ID NO: 5893 - DNA, 21 bp, synthetic construct
  source 1..21: mol_type = other DNA
  misc_feature 1..21: note = n-mer motif encoding polynucleotide
tatatttcggcgcctccgatg

SEQ ID NO: 5894 - DNA, 21 bp, synthetic construct
  misc_feature 1..21: note = n-mer motif encoding polynucleotide
  source 1..21: mol_type = other DNA
cgaaacaacccatcgcacgac

SEQ ID NO: 5895 - DNA, 21 bp, synthetic construct
  misc_feature 1..21: note = n-mer motif encoding polynucleotide
  source 1..21: mol_type = other DNA
ggaacctccatagactacgta

SEQ ID NO: 5896 - DNA, 21 bp, synthetic construct
  misc_feature 1..21: note = n-mer motif encoding polynucleotide
  source 1..21: mol_type = other DNA
ggcaccgggtacccaaaccaa

SEQ ID NO: 5897 - DNA, 21 bp, synthetic construct
  misc_feature 1..21: note = n-mer motif encoding polynucleotide
  source 1..21: mol_type = other DNA
gatcatatgaatttgaggtct

SEQ ID NO: 5898 - DNA, 21 bp, synthetic construct
  misc_feature 1..21: note = n-mer motif encoding polynucleotide
  source 1..21: mol_type = other DNA
attaattcgtatttgcatgag

SEQ ID NO: 5899 - DNA, 21 bp, synthetic construct
  source 1..21: mol_type = other DNA
  misc_feature 1..21: note = n-mer motif encoding polynucleotide
tggcaaatgggggccgggagc

SEQ ID NO: 5900 - DNA, 21 bp, synthetic construct
  source 1..21: mol_type = other DNA
  misc_feature 1..21: note = n-mer motif encoding polynucleotide
atgggtatcgggtcatacaaa

SEQ ID NO: 5901 - DNA, 21 bp, synthetic construct
  misc_feature 1..21: note = n-mer motif encoding polynucleotide
  source 1..21: mol_type = other DNA
caaaaccacaacgaactaaaa

SEQ ID NO: 5902 - DNA, 21 bp, synthetic construct
  misc_feature 1..21: note = n-mer motif encoding polynucleotide
  source 1..21: mol_type = other DNA
gataagtctaattatagtatt

SEQ ID NO: 5903 - DNA, 21 bp, synthetic construct
  source 1..21: mol_type = other DNA
  misc_feature 1..21: note = n-mer motif encoding polynucleotide
acaacgaaaccggtcgcggaa

SEQ ID NO: 5904 - DNA, 21 bp, synthetic construct
  misc_feature 1..21: note = n-mer motif encoding polynucleotide
  source 1..21: mol_type = other DNA
gtgactgtgagtaatagtctg

SEQ ID NO: 5905 - DNA, 21 bp, synthetic construct
  misc_feature 1..21: note = n-mer motif encoding polynucleotide
  source 1..21: mol_type = other DNA
acggcgtatctggatggtctg

SEQ ID NO: 5906 - DNA, 21 bp, synthetic construct
  misc_feature 1..21: note = n-mer motif encoding polynucleotide
  source 1..21: mol_type = other DNA
aatttgcagactggtgttcag

SEQ ID NO: 5907 - DNA, 21 bp, synthetic construct
  source 1..21: mol_type = other DNA
  misc_feature 1..21: note = n-mer motif encoding polynucleotide
accgtcgctccctacagtagc

SEQ ID NO: 5908 - DNA, 21 bp, synthetic construct
  source 1..21: mol_type = other DNA
  misc_feature 1..21: note = n-mer motif encoding polynucleotide
gttcagatttctatgaataat

SEQ ID NO: 5909 - DNA, 21 bp, synthetic construct
  source 1..21: mol_type = other DNA
  misc_feature 1..21: note = n-mer motif encoding polynucleotide
tacatagcaggtggtgaacaa

SEQ ID NO: 5910 - DNA, 21 bp, synthetic construct
  misc_feature 1..21: note = n-mer motif encoding polynucleotide
  source 1..21: mol_type = other DNA
ttcatggaagtcatgaaaaac

SEQ ID NO: 5911 - DNA, 21 bp, synthetic construct
  misc_feature 1..21: note = n-mer motif encoding polynucleotide
  source 1..21: mol_type = other DNA
acgactgataagggtattaat

SEQ ID NO: 5912 - DNA, 21 bp, synthetic construct
  source 1..21: mol_type = other DNA
  misc_feature 1..21: note = n-mer motif encoding polynucleotide
ttgagctacagcatccaacac

SEQ ID NO: 5913 - DNA, 21 bp, synthetic construct
  source 1..21: mol_type = other DNA
  misc_feature 1..21: note = n-mer motif encoding polynucleotide
gcttataatgctcgtctgcct

SEQ ID NO: 5914 - DNA, 21 bp, synthetic construct
  source 1..21: mol_type = other DNA
  misc_feature 1..21: note = n-mer motif encoding polynucleotide
aacaccggcaccacgagtgtc

SEQ ID NO: 5915 - DNA, 21 bp, synthetic construct
  source 1..21: mol_type = other DNA
  misc_feature 1..21: note = n-mer motif encoding polynucleotide
gtgctgagtacggggctgcgg

SEQ ID NO: 5916 - DNA, 21 bp, synthetic construct
  source 1..21: mol_type = other DNA
  misc_feature 1..21: note = n-mer motif encoding polynucleotide
aacgactcctcgtcaatgtcc

SEQ ID NO: 5917 - DNA, 21 bp, synthetic construct
  source 1..21: mol_type = other DNA
  misc_feature 1..21: note = n-mer motif encoding polynucleotide
cgccaaggcagcttgatgata

SEQ ID NO: 5918 - DNA, 21 bp, synthetic construct
  misc_feature 1..21: note = n-mer motif encoding polynucleotide
  source 1..21: mol_type = other DNA
atcagcaccgcatacatgttg

SEQ ID NO: 5919 - DNA, 21 bp, synthetic construct
  misc_feature 1..21: note = n-mer motif encoding polynucleotide
  source 1..21: mol_type = other DNA
ggtactatgaatattggtatt

SEQ ID NO: 5920 - DNA, 21 bp, synthetic construct
  misc_feature 1..21: note = n-mer motif encoding polynucleotide
  source 1..21: mol_type = other DNA
cataataataatttgctgaat

SEQ ID NO: 5921 - DNA, 21 bp, synthetic construct
  source 1..21: mol_type = other DNA
  misc_feature 1..21: note = n-mer motif encoding polynucleotide
catttttcgcagattactaat

SEQ ID NO: 5922 - DNA, 21 bp, synthetic construct
  source 1..21: mol_type = other DNA
  misc_feature 1..21: note = n-mer motif encoding polynucleotide
gacctgaccagagctgcaata

SEQ ID NO: 5923 - DNA, 21 bp, synthetic construct
  source 1..21: mol_type = other DNA
  misc_feature 1..21: note = n-mer motif encoding polynucleotide
gtcgctatgggaggcggtccc

SEQ ID NO: 5924 - DNA, 21 bp, synthetic construct
  misc_feature 1..21: note = n-mer motif encoding polynucleotide
  source 1..21: mol_type = other DNA
gcctacggtatcagagaagtg

SEQ ID NO: 5925 - DNA, 21 bp, synthetic construct
  source 1..21: mol_type = other DNA
  misc_feature 1..21: note = n-mer motif encoding polynucleotide
acatcagacggtctactaagt

SEQ ID NO: 5926 - DNA, 21 bp, synthetic construct
  misc_feature 1..21: note = n-mer motif encoding polynucleotide
  source 1..21: mol_type = other DNA
acgatggctacaaacttaagt

SEQ ID NO: 5927 - DNA, 21 bp, synthetic construct
  source 1..21: mol_type = other DNA
  misc_feature 1..21: note = n-mer motif encoding polynucleotide
aacaacggcaactcatcaagg

SEQ ID NO: 5928 - DNA, 21 bp, synthetic construct
  misc_feature 1..21: note = n-mer motif encoding polynucleotide
  source 1..21: mol_type = other DNA
acggagaaggcgagtcctctg

SEQ ID NO: 5929 - DNA, 21 bp, synthetic construct
  source 1..21: mol_type = other DNA
  misc_feature 1..21: note = n-mer motif encoding polynucleotide
ctcaaccacacaatgcccctc

SEQ ID NO: 5930 - DNA, 21 bp, synthetic construct
  misc_feature 1..21: note = n-mer motif encoding polynucleotide
  source 1..21: mol_type = other DNA
gatacggcgagttataataat

SEQ ID NO: 5931 - DNA, 21 bp, synthetic construct
  source 1..21: mol_type = other DNA
  misc_feature 1..21: note = n-mer motif encoding polynucleotide
aacatgaccaacgaacggctc

SEQ ID NO: 5932 - DNA, 21 bp, synthetic construct
  source 1..21: mol_type = other DNA
  misc_feature 1..21: note = n-mer motif encoding polynucleotide
gtagtctcatcgggcggctgg

SEQ ID NO: 5933 - DNA, 21 bp, synthetic construct
  misc_feature 1..21: note = n-mer motif encoding polynucleotide
  source 1..21: mol_type = other DNA
gtgaatcagagtcctggggct

SEQ ID NO: 5934 - DNA, 21 bp, synthetic construct
  source 1..21: mol_type = other DNA
  misc_feature 1..21: note = n-mer motif encoding polynucleotide
gatcatcatcctcagagtcgt

SEQ ID NO: 5935 - DNA, 21 bp, synthetic construct
  misc_feature 1..21: note = n-mer motif encoding polynucleotide
  source 1..21: mol_type = other DNA
cgatggcaaggactgagcgcg

SEQ ID NO: 5936 - DNA, 21 bp, synthetic construct
  source 1..21: mol_type = other DNA
  misc_feature 1..21: note = n-mer motif encoding polynucleotide
gcggttacgacaagcgtgagg

SEQ ID NO: 5937 - DNA, 21 bp, synthetic construct
  source 1..21: mol_type = other DNA
  misc_feature 1..21: note = n-mer motif encoding polynucleotide
tggggagtcagtaactcagca

SEQ ID NO: 5938 - DNA, 21 bp, synthetic construct
  source 1..21: mol_type = other DNA
  misc_feature 1..21: note = n-mer motif encoding polynucleotide
gcgcatatgcattcggagttg

SEQ ID NO: 5939 - DNA, 21 bp, synthetic construct
  source 1..21: mol_type = other DNA
  misc_feature 1..21: note = n-mer motif encoding polynucleotide
aataatcttacgaattcgacg

SEQ ID NO: 5940 - DNA, 21 bp, synthetic construct
  misc_feature 1..21: note = n-mer motif encoding polynucleotide
  source 1..21: mol_type = other DNA
agtagtgggggtatgaaggcg

SEQ ID NO: 5941 - DNA, 21 bp, synthetic construct
  misc_feature 1..21: note = n-mer motif encoding polynucleotide
  source 1..21: mol_type = other DNA
gttgggtatggggagcatgtt

SEQ ID NO: 5942 - DNA, 21 bp, synthetic construct
  misc_feature 1..21: note = n-mer motif encoding polynucleotide
  source 1..21: mol_type = other DNA
accatagtgtccacttcttac

SEQ ID NO: 5943 - DNA, 21 bp, synthetic construct
  source 1..21: mol_type = other DNA
  misc_feature 1..21: note = n-mer motif encoding polynucleotide
cccaccagtcaccaagaaccc

SEQ ID NO: 5944 - DNA, 21 bp, synthetic construct
  source 1..21: mol_type = other DNA
  misc_feature 1..21: note = n-mer motif encoding polynucleotide
tctaaccttcgaaacacaata

SEQ ID NO: 5945 - DNA, 21 bp, synthetic construct
  source 1..21: mol_type = other DNA
  misc_feature 1..21: note = n-mer motif encoding polynucleotide
tcaagacacgacgtccgaaac

SEQ ID NO: 5946 - DNA, 21 bp, synthetic construct
  source 1..21: mol_type = other DNA
  misc_feature 1..21: note = n-mer motif encoding polynucleotide
cagatgaatattcatgataag

SEQ ID NO: 5947 - DNA, 21 bp, synthetic construct
  source 1..21: mol_type = other DNA
  misc_feature 1..21: note = n-mer motif encoding polynucleotide
tgggctatgaataatgtgccg

SEQ ID NO: 5948 - DNA, 21 bp, synthetic construct
  misc_feature 1..21: note = n-mer motif encoding polynucleotide
  source 1..21: mol_type = other DNA
gcgatggatgggtatagggtt

SEQ ID NO: 5949 - DNA, 21 bp, synthetic construct
  misc_feature 1..21: note = n-mer motif encoding polynucleotide
  source 1..21: mol_type = other DNA
aaagggggaaacctcaccgca

SEQ ID NO: 5950 - DNA, 21 bp, synthetic construct
  misc_feature 1..21: note = n-mer motif encoding polynucleotide
  source 1..21: mol_type = other DNA
attggtaaggatagtgttccg

SEQ ID NO: 5951 - DNA, 21 bp, synthetic construct
  misc_feature 1..21: note = n-mer motif encoding polynucleotide
  source 1..21: mol_type = other DNA
gtgcagttgacgcataatggg

SEQ ID NO: 5952 - DNA, 21 bp, synthetic construct
  source 1..21: mol_type = other DNA
  misc_feature 1..21: note = n-mer motif encoding polynucleotide
ggcctgaaccagatcacatcg

SEQ ID NO: 5953 - DNA, 21 bp, synthetic construct
  source 1..21: mol_type = other DNA
  misc_feature 1..21: note = n-mer motif encoding polynucleotide
aggggtgatccttctacgcct

SEQ ID NO: 5954 - DNA, 21 bp, synthetic construct
  source 1..21: mol_type = other DNA
  misc_feature 1..21: note = n-mer motif encoding polynucleotide
gttccctccgacccccactgg

SEQ ID NO: 5955 - DNA, 21 bp, synthetic construct
  source 1..21: mol_type = other DNA
  misc_feature 1..21: note = n-mer motif encoding polynucleotide
acgttaagttcccaagtcaca

SEQ ID NO: 5956 - DNA, 21 bp, synthetic construct
  misc_feature 1..21: note = n-mer motif encoding polynucleotide
  source 1..21: mol_type = other DNA
aaccaaagagttgaacaaaaa

SEQ ID NO: 5957 - DNA, 21 bp, synthetic construct
  source 1..21: mol_type = other DNA
  misc_feature 1..21: note = n-mer motif encoding polynucleotide
gtacttccaagtcggatcgcg

SEQ ID NO: 5958 - DNA, 21 bp, synthetic construct
  misc_feature 1..21: note = n-mer motif encoding polynucleotide
  source 1..21: mol_type = other DNA
gggcactacgctacaaacaca

SEQ ID NO: 5959 - DNA, 21 bp, synthetic construct
  source 1..21: mol_type = other DNA
  misc_feature 1..21: note = n-mer motif encoding polynucleotide
ccttcgattccgtcgttttcg

SEQ ID NO: 5960 - DNA, 21 bp, synthetic construct
  source 1..21: mol_type = other DNA
  misc_feature 1..21: note = n-mer motif encoding polynucleotide
acttatgagtatccgactcgg

SEQ ID NO: 5961 - DNA, 21 bp, synthetic construct
  misc_feature 1..21: note = n-mer motif encoding polynucleotide
  source 1..21: mol_type = other DNA
aaagaccacatcctcagcctc

SEQ ID NO: 5962 - DNA, 21 bp, synthetic construct
  misc_feature 1..21: note = n-mer motif encoding polynucleotide
  source 1..21: mol_type = other DNA
ggcacaggaggtaaccgagaa

SEQ ID NO: 5963 - DNA, 21 bp, synthetic construct
  source 1..21: mol_type = other DNA
  misc_feature 1..21: note = n-mer motif encoding polynucleotide
aagggggatggtgcttatgag

SEQ ID NO: 5964 - DNA, 21 bp, synthetic construct
  source 1..21: mol_type = other DNA
  misc_feature 1..21: note = n-mer motif encoding polynucleotide
tcttctttcggaaaagacaac

SEQ ID NO: 5965 - DNA, 21 bp, synthetic construct
  source 1..21: mol_type = other DNA
  misc_feature 1..21: note = n-mer motif encoding polynucleotide
acagtatcgtcatacgtacaa

SEQ ID NO: 5966 - DNA, 21 bp, synthetic construct
  misc_feature 1..21: note = n-mer motif encoding polynucleotide
  source 1..21: mol_type = other DNA
agggctcatggggataatcag

SEQ ID NO: 5967 - DNA, 21 bp, synthetic construct
  misc_feature 1..21: note = n-mer motif encoding polynucleotide
  source 1..21: mol_type = other DNA
tatcatgctcatagtaatgag

SEQ ID NO: 5968 - DNA, 21 bp, synthetic construct
  misc_feature 1..21: note = n-mer motif encoding polynucleotide
  source 1..21: mol_type = other DNA
gcaaacttgcccagcggtcac

SEQ ID NO: 5969 - DNA, 21 bp, synthetic construct
  source 1..21: mol_type = other DNA
  misc_feature 1..21: note = n-mer motif encoding polynucleotide
gcgaacctcaacttgaccagt

SEQ ID NO: 5970 - DNA, 21 bp, synthetic construct
  misc_feature 1..21: note = n-mer motif encoding polynucleotide
  source 1..21: mol_type = other DNA
aggcttaatgcgggtgagcat

SEQ ID NO: 5971 - DNA, 21 bp, synthetic construct
  misc_feature 1..21: note = n-mer motif encoding polynucleotide
  source 1..21: mol_type = other DNA
tatgttgattatagtaagtcg

SEQ ID NO: 5972 - DNA, 21 bp, synthetic construct
  misc_feature 1..21: note = n-mer motif encoding polynucleotide
  source 1..21: mol_type = other DNA
gctaattctgggttgcataat

SEQ ID NO: 5973 - DNA, 21 bp, synthetic construct
  misc_feature 1..21: note = n-mer motif encoding polynucleotide
  source 1..21: mol_type = other DNA
acgagtggtgtgcttacgcgg

SEQ ID NO: 5974 - DNA, 21 bp, synthetic construct
  source 1..21: mol_type = other DNA
  misc_feature 1..21: note = n-mer motif encoding polynucleotide
ggaaaaccagcacaagaattc

SEQ ID NO: 5975 - DNA, 21 bp, synthetic construct
  source 1..21: mol_type = other DNA
  misc_feature 1..21: note = n-mer motif encoding polynucleotide
gtggggacgcatttgcattcg

SEQ ID NO: 5976 - DNA, 21 bp, synthetic construct
  misc_feature 1..21: note = n-mer motif encoding polynucleotide
  source 1..21: mol_type = other DNA
ccgatgaacaaagacatactg

SEQ ID NO: 5977 - DNA, 21 bp, synthetic construct
  source 1..21: mol_type = other DNA
  misc_feature 1..21: note = n-mer motif encoding polynucleotide
gacgcccaccactcaagcagc

SEQ ID NO: 5978 - DNA, 21 bp, synthetic construct
  misc_feature 1..21: note = n-mer motif encoding polynucleotide
  source 1..21: mol_type = other DNA
actaacgccatctctcaaacg

SEQ ID NO: 5979 - DNA, 21 bp, synthetic construct
  misc_feature 1..21: note = n-mer motif encoding polynucleotide
  source 1..21: mol_type = other DNA
gttttgtctgataaggcgtat

SEQ ID NO: 5980 - DNA, 21 bp, synthetic construct
  source 1..21: mol_type = other DNA
  misc_feature 1..21: note = n-mer motif encoding polynucleotide
aacctacttgtcgaccaacgt

SEQ ID NO: 5981 - DNA, 21 bp, synthetic construct
  misc_feature 1..21: note = n-mer motif encoding polynucleotide
  source 1..21: mol_type = other DNA
actggtcatccgccggcggcg

SEQ ID NO: 5982 - DNA, 21 bp, synthetic construct
  source 1..21: mol_type = other DNA
  misc_feature 1..21: note = n-mer motif encoding polynucleotide
attagttcggggattttgtcg

SEQ ID NO: 5983 - DNA, 21 bp, synthetic construct
  misc_feature 1..21: note = n-mer motif encoding polynucleotide
  source 1..21: mol_type = other DNA
aatacgaatttgttgggttat

SEQ ID NO: 5984 - DNA, 21 bp, synthetic construct
  misc_feature 1..21: note = n-mer motif encoding polynucleotide
  source 1..21: mol_type = other DNA
acgctatcggttaccctgggt

SEQ ID NO: 5985 - DNA, 21 bp, synthetic construct
  source 1..21: mol_type = other DNA
  misc_feature 1..21: note = n-mer motif encoding polynucleotide
catactggtgttcagactaat

SEQ ID NO: 5986 - DNA, 21 bp, synthetic construct
  source 1..21: mol_type = other DNA
  misc_feature 1..21: note = n-mer motif encoding polynucleotide
gaggttagtaataataattat

SEQ ID NO: 5987 - DNA, 21 bp, synthetic construct
  source 1..21: mol_type = other DNA
  misc_feature 1..21: note = n-mer motif encoding polynucleotide
ctggctaatatttcgctgtat

SEQ ID NO: 5988 - DNA, 21 bp, synthetic construct
  misc_feature 1..21: note = n-mer motif encoding polynucleotide
  source 1..21: mol_type = other DNA
gtggagcatgttgctcatcag

SEQ ID NO: 5989 - DNA, 21 bp, synthetic construct
  source 1..21: mol_type = other DNA
  misc_feature 1..21: note = n-mer motif encoding polynucleotide
gtcgacaaaagcgaagccgac

SEQ ID NO: 5990 - DNA, 21 bp, synthetic construct
  source 1..21: mol_type = other DNA
  misc_feature 1..21: note = n-mer motif encoding polynucleotide
ggcttcgcattaactggcacc

SEQ ID NO: 5991 - DNA, 21 bp, synthetic construct
  misc_feature 1..21: note = n-mer motif encoding polynucleotide
  source 1..21: mol_type = other DNA
ttgttgacggctccgcatagg

SEQ ID NO: 5992 - DNA, 21 bp, synthetic construct
  source 1..21: mol_type = other DNA
  misc_feature 1..21: note = n-mer motif encoding polynucleotide
aatgcgggggctcttatgggt

SEQ ID NO: 5993 - DNA, 21 bp, synthetic construct
  misc_feature 1..21: note = n-mer motif encoding polynucleotide
  source 1..21: mol_type = other DNA
aggacgcaagcaggggactca

SEQ ID NO: 5994 - DNA, 21 bp, synthetic construct
  source 1..21: mol_type = other DNA
  misc_feature 1..21: note = n-mer motif encoding polynucleotide
aacacacacagacaagaatac

SEQ ID NO: 5995 - DNA, 21 bp, synthetic construct
  misc_feature 1..21: note = n-mer motif encoding polynucleotide
  source 1..21: mol_type = other DNA
aacatagcaggcggagaacaa

SEQ ID NO: 5996 - DNA, 21 bp, synthetic construct
  misc_feature 1..21: note = n-mer motif encoding polynucleotide
  source 1..21: mol_type = other DNA
gagattaataatcggactggt

SEQ ID NO: 5997 - DNA, 21 bp, synthetic construct
  misc_feature 1..21: note = n-mer motif encoding polynucleotide
  source 1..21: mol_type = other DNA
accgttaacacaatgtacacg

SEQ ID NO: 5998 - DNA, 21 bp, synthetic construct
  misc_feature 1..21: note = n-mer motif encoding polynucleotide
  source 1..21: mol_type = other DNA
cctatgaatggtattctgttg

SEQ ID NO: 5999 - DNA, 21 bp, synthetic construct
  misc_feature 1..21: note = n-mer motif encoding polynucleotide
  source 1..21: mol_type = other DNA
aatcctagttatgatcatcgg

SEQ ID NO: 6000 - DNA, 21 bp, synthetic construct
  misc_feature 1..21: note = n-mer motif encoding polynucleotide
  source 1..21: mol_type = other DNA
gctgttattctgaatcctgtt

SEQ ID NO: 6001 - DNA, 21 bp, synthetic construct
  misc_feature 1..21: note = n-mer motif encoding polynucleotide
  source 1..21: mol_type = other DNA
ctgtacgggggagcacaccaa

SEQ ID NO: 6002 - DNA, 21 bp, synthetic construct
  source 1..21: mol_type = other DNA
  misc_feature 1..21: note = n-mer motif encoding polynucleotide
caagtcaaccaaccgagaata

SEQ ID NO: 6003 - DNA, 21 bp, synthetic construct
  source 1..21: mol_type = other DNA
  misc_feature 1..21: note = n-mer motif encoding polynucleotide
gctgttagaacaccggcaatg

SEQ ID NO: 6004 - DNA, 21 bp, synthetic construct
  source 1..21: mol_type = other DNA
  misc_feature 1..21: note = n-mer motif encoding polynucleotide
agtttgacgcctaataatctt

SEQ ID NO: 6005 - DNA, 21 bp, synthetic construct
  misc_feature 1..21: note = n-mer motif encoding polynucleotide
  source 1..21: mol_type = other DNA
cttgggcaggttaattctacg

SEQ ID NO: 6006 - DNA, 21 bp, synthetic construct
  source 1..21: mol_type = other DNA
  misc_feature 1..21: note = n-mer motif encoding polynucleotide
gctaattctgctactaatcag

SEQ ID NO: 6007 - DNA, 21 bp, synthetic construct
  source 1..21: mol_type = other DNA
  misc_feature 1..21: note = n-mer motif encoding polynucleotide
tccttgacggaaaaagcgccg

SEQ ID NO: 6008 - DNA, 21 bp, synthetic construct
  misc_feature 1..21: note = n-mer motif encoding polynucleotide
  source 1..21: mol_type = other DNA
caattccacgggacatctgaa

SEQ ID NO: 6009 - DNA, 21 bp, synthetic construct
  misc_feature 1..21: note = n-mer motif encoding polynucleotide
  source 1..21: mol_type = other DNA
aaaaacggcgccataggaaca

SEQ ID NO: 6010 - DNA, 21 bp, synthetic construct
  source 1..21: mol_type = other DNA
  misc_feature 1..21: note = n-mer motif encoding polynucleotide
gtgctggcgtcgactgagaag

SEQ ID NO: 6011 - DNA, 21 bp, synthetic construct
  source 1..21: mol_type = other DNA
  misc_feature 1..21: note = n-mer motif encoding polynucleotide
agtaatatgagtgaggcgatt

SEQ ID NO: 6012 - DNA, 21 bp, synthetic construct
  misc_feature 1..21: note = n-mer motif encoding polynucleotide
  source 1..21: mol_type = other DNA
aacgctaacgccggtggaaac

SEQ ID NO: 6013 - DNA, 21 bp, synthetic construct
  source 1..21: mol_type = other DNA
  misc_feature 1..21: note = n-mer motif encoding polynucleotide
cactctaacacacactacgaa

SEQ ID NO: 6014 - DNA, 21 bp, synthetic construct
  source 1..21: mol_type = other DNA
  misc_feature 1..21: note = n-mer motif encoding polynucleotide
agtgctttgattagtgtggtt

SEQ ID NO: 6015 - DNA, 21 bp, synthetic construct
  misc_feature 1..21: note = n-mer motif encoding polynucleotide
  source 1..21: mol_type = other DNA
gtggcgactcattataatgag

SEQ ID NO: 6016 - DNA, 21 bp, synthetic construct
  source 1..21: mol_type = other DNA
  misc_feature 1..21: note = n-mer motif encoding polynucleotide
aaccaaacgttacaagtagac

SEQ ID NO: 6017 - DNA, 21 bp, synthetic construct
  misc_feature 1..21: note = n-mer motif encoding polynucleotide
  source 1..21: mol_type = other DNA
aaaacaccctcagcttcagaa

SEQ ID NO: 6018 - DNA, 21 bp, synthetic construct
  misc_feature 1..21: note = n-mer motif encoding polynucleotide
  source 1..21: mol_type = other DNA
ggtgaatcacgtacaaacatg

SEQ ID NO: 6019 - DNA, 21 bp, synthetic construct
  misc_feature 1..21: note = n-mer motif encoding polynucleotide
  source 1..21: mol_type = other DNA
cggaatgagccggttagtact

SEQ ID NO: 6020 - DNA, 21 bp, synthetic construct
  misc_feature 1..21: note = n-mer motif encoding polynucleotide
  source 1..21: mol_type = other DNA
gcaacacacgccatgcgccca

SEQ ID NO: 6021 - DNA, 21 bp, synthetic construct
  misc_feature 1..21: note = n-mer motif encoding polynucleotide
  source 1..21: mol_type = other DNA
tgggaatccctctccaacgca

SEQ ID NO: 6022 - DNA, 21 bp, synthetic construct
  misc_feature 1..21: note = n-mer motif encoding polynucleotide
  source 1..21: mol_type = other DNA
catagtcctcctacgactatg

SEQ ID NO: 6023 - DNA, 21 bp, synthetic construct
  misc_feature 1..21: note = n-mer motif encoding polynucleotide
  source 1..21: mol_type = other DNA
tctaccatgaacacgatcacg

SEQ ID NO: 6024 - DNA, 21 bp, synthetic construct
  misc_feature 1..21: note = n-mer motif encoding polynucleotide
  source 1..21: mol_type = other DNA
aacatggaacacaccatggcg

SEQ ID NO: 6025 - DNA, 21 bp, synthetic construct
  misc_feature 1..21: note = n-mer motif encoding polynucleotide
  source 1..21: mol_type = other DNA
cataatacggagtctaagact

SEQ ID NO: 6026 - DNA, 21 bp, synthetic construct
  source 1..21: mol_type = other DNA
  misc_feature 1..21: note = n-mer motif encoding polynucleotide
cacaacttaatgacccaaata

SEQ ID NO: 6027 - DNA, 21 bp, synthetic construct
  source 1..21: mol_type = other DNA
  misc_feature 1..21: note = n-mer motif encoding polynucleotide
aaccaaaacacctacgaactg

SEQ ID NO: 6028 - DNA, 21 bp, synthetic construct
  misc_feature 1..21: note = n-mer motif encoding polynucleotide
  source 1..21: mol_type = other DNA
tacgccactctcgacaccatc

SEQ ID NO: 6029 - DNA, 21 bp, synthetic construct
  source 1..21: mol_type = other DNA
  misc_feature 1..21: note = n-mer motif encoding polynucleotide
gttcagttggagaatgcgaat

SEQ ID NO: 6030 - DNA, 21 bp, synthetic construct
  misc_feature 1..21: note = n-mer motif encoding polynucleotide
  source 1..21: mol_type = other DNA
gggctcacaggatacacaatg

SEQ ID NO: 6031 - DNA, 21 bp, synthetic construct
  source 1..21: mol_type = other DNA
  misc_feature 1..21: note = n-mer motif encoding polynucleotide
ttagtacttgactcacggaac

SEQ ID NO: 6032 - DNA, 21 bp, synthetic construct
  source 1..21: mol_type = other DNA
  misc_feature 1..21: note = n-mer motif encoding polynucleotide
atgttggtacaaaacacaccc

SEQ ID NO: 6033 - DNA, 21 bp, synthetic construct
  source 1..21: mol_type = other DNA
  misc_feature 1..21: note = n-mer motif encoding polynucleotide
cctcataatcaggagatgggt

SEQ ID NO: 6034 - DNA, 21 bp, synthetic construct
  source 1..21: mol_type = other DNA
  misc_feature 1..21: note = n-mer motif encoding polynucleotide
tcgttgggggatgcgatgttg

SEQ ID NO: 6035 - DNA, 21 bp, synthetic construct
  misc_feature 1..21: note = n-mer motif encoding polynucleotide
  source 1..21: mol_type = other DNA
cgcgccgaagggagctctggc

SEQ ID NO: 6036 - DNA, 21 bp, synthetic construct
  misc_feature 1..21: note = n-mer motif encoding polynucleotide
  source 1..21: mol_type = other DNA
agtgaggagaggacgcgtgcg

SEQ ID NO: 6037 - DNA, 21 bp, synthetic construct
  misc_feature 1..21: note = n-mer motif encoding polynucleotide
  source 1..21: mol_type = other DNA
tctagtaaggagcgtacatcg

SEQ ID NO: 6038 - DNA, 21 bp, synthetic construct
  source 1..21: mol_type = other DNA
  misc_feature 1..21: note = n-mer motif encoding polynucleotide
cctgttgtgagggatcgttct

SEQ ID NO: 6039 - DNA, 21 bp, synthetic construct
  misc_feature 1..21: note = n-mer motif encoding polynucleotide
  source 1..21: mol_type = other DNA
aggatgtctgagagttcggat

SEQ ID NO: 6040 - DNA, 21 bp, synthetic construct
  source 1..21: mol_type = other DNA
  misc_feature 1..21: note = n-mer motif encoding polynucleotide
aaccaatctataagcatggac

SEQ ID NO: 6041 - DNA, 21 bp, synthetic construct
  misc_feature 1..21: note = n-mer motif encoding polynucleotide
  source 1..21: mol_type = other DNA
gtcgctgtatcgaacactcca

SEQ ID NO: 6042 - DNA, 21 bp, synthetic construct
  source 1..21: mol_type = other DNA
  misc_feature 1..21: note = n-mer motif encoding polynucleotide
ggagacatctcaagcagaaac

SEQ ID NO: 6043 - DNA, 21 bp, synthetic construct
  misc_feature 1..21: note = n-mer motif encoding polynucleotide
  source 1..21: mol_type = other DNA
gctgccggagccgactctcca

SEQ ID NO: 6044 - DNA, 21 bp, synthetic construct
  source 1..21: mol_type = other DNA
  misc_feature 1..21: note = n-mer motif encoding polynucleotide
ttcggcacatcgtacacaacc

SEQ ID NO: 6045 - DNA, 21 bp, synthetic construct
  source 1..21: mol_type = other DNA
  misc_feature 1..21: note = n-mer motif encoding polynucleotide
cgtgatactaatacggataag

SEQ ID NO: 6046 - DNA, 21 bp, synthetic construct
  source 1..21: mol_type = other DNA
  misc_feature 1..21: note = n-mer motif encoding polynucleotide
gggtctacgccgggggcgagt

SEQ ID NO: 6047 - DNA, 21 bp, synthetic construct
  source 1..21: mol_type = other DNA
  misc_feature 1..21: note = n-mer motif encoding polynucleotide
ggtactaatcatgatttttcg

SEQ ID NO: 6048 - DNA, 21 bp, synthetic construct
  source 1..21: mol_type = other DNA
  misc_feature 1..21: note = n-mer motif encoding polynucleotide
aatgagagtacgaaggagagt

SEQ ID NO: 6049 - DNA, 21 bp, synthetic construct
  source 1..21: mol_type = other DNA
  misc_feature 1..21: note = n-mer motif encoding polynucleotide
gtgcatgtgactaatgtgttg

SEQ ID NO: 6050 - DNA, 21 bp, synthetic construct
  misc_feature 1..21: note = n-mer motif encoding polynucleotide
  source 1..21: mol_type = other DNA
agtactactaatgttgcgtat

SEQ ID NO: 6051 - DNA, 21 bp, synthetic construct
  source 1..21: mol_type = other DNA
  misc_feature 1..21: note = n-mer motif encoding polynucleotide
attacgtcgttgaatgggatg

SEQ ID NO: 6052 - DNA, 21 bp, synthetic construct
  misc_feature 1..21: note = n-mer motif encoding polynucleotide
  source 1..21: mol_type = other DNA
gaagtacggggcagcgtgcca

SEQ ID NO: 6053 - DNA, 21 bp, synthetic construct
  source 1..21: mol_type = other DNA
  misc_feature 1..21: note = n-mer motif encoding polynucleotide
gcacttacccgtatgcctaac

SEQ ID NO: 6054 - DNA, 21 bp, synthetic construct
  source 1..21: mol_type = other DNA
  misc_feature 1..21: note = n-mer motif encoding polynucleotide
ctcagtgtagccgacaggcca

SEQ ID NO: 6055 - DNA, 21 bp, synthetic construct
  misc_feature 1..21: note = n-mer motif encoding polynucleotide
  source 1..21: mol_type = other DNA
gtttctacggcgcagaggcag

SEQ ID NO: 6056 - DNA, 21 bp, synthetic construct
  misc_feature 1..21: note = n-mer motif encoding polynucleotide
  source 1..21: mol_type = other DNA
ttaaacgcagaatacaccaac

SEQ ID NO: 6057 - DNA, 21 bp, synthetic construct
  source 1..21: mol_type = other DNA
  misc_feature 1..21: note = n-mer motif encoding polynucleotide
aatgagaagccgcagtcgacg

SEQ ID NO: 6058 - DNA, 21 bp, synthetic construct
  misc_feature 1..21: note = n-mer motif encoding polynucleotide
  source 1..21: mol_type = other DNA
ttgaatacgctgattgataag

SEQ ID NO: 6059 - DNA, 21 bp, synthetic construct
  misc_feature 1..21: note = n-mer motif encoding polynucleotide
  source 1..21: mol_type = other DNA
gtcacacacacactgatcgaa

SEQ ID NO: 6060 - DNA, 21 bp, synthetic construct
  misc_feature 1..21: note = n-mer motif encoding polynucleotide
  source 1..21: mol_type = other DNA
gagcagaagaagactgatcat

SEQ ID NO: 6061 - DNA, 21 bp, synthetic construct
  misc_feature 1..21: note = n-mer motif encoding polynucleotide
  source 1..21: mol_type = other DNA
acatcaggcatgtacgacacg

SEQ ID NO: 6062 - DNA, 21 bp, synthetic construct
  source 1..21: mol_type = other DNA
  misc_feature 1..21: note = n-mer motif encoding polynucleotide
cctgacgcagcgcgtagcccg

SEQ ID NO: 6063 - DNA, 21 bp, synthetic construct
  source 1..21: mol_type = other DNA
  misc_feature 1..21: note = n-mer motif encoding polynucleotide
ttgacgcaggtttatcatgag

SEQ ID NO: 6064 - DNA, 21 bp, synthetic construct
  source 1..21: mol_type = other DNA
  misc_feature 1..21: note = n-mer motif encoding polynucleotide
agagaaatgagcagcctatct

SEQ ID NO: 6065 - DNA, 21 bp, synthetic construct
  misc_feature 1..21: note = n-mer motif encoding polynucleotide
  source 1..21: mol_type = other DNA
atgccttcgaaaggcgaagta

SEQ ID NO: 6066 - DNA, 21 bp, synthetic construct
  source 1..21: mol_type = other DNA
  misc_feature 1..21: note = n-mer motif encoding polynucleotide
aatgagcagaatacgccgagt

SEQ ID NO: 6067 - DNA, 21 bp, synthetic construct
  source 1..21: mol_type = other DNA
  misc_feature 1..21: note = n-mer motif encoding polynucleotide
aaaaactacgcaagcaccgac

SEQ ID NO: 6068 - DNA, 21 bp, synthetic construct
  source 1..21: mol_type = other DNA
  misc_feature 1..21: note = n-mer motif encoding polynucleotide
tgtatggatgttggtaaggcg

SEQ ID NO: 6069 - DNA, 21 bp, synthetic construct
  misc_feature 1..21: note = n-mer motif encoding polynucleotide
  source 1..21: mol_type = other DNA
gctcttcataatctgatgaat

SEQ ID NO: 6070 - DNA, 21 bp, synthetic construct
  misc_feature 1..21: note = n-mer motif encoding polynucleotide
  source 1..21: mol_type = other DNA
cctgacagagcgaacgacaaa

SEQ ID NO: 6071 - DNA, 21 bp, synthetic construct
  source 1..21: mol_type = other DNA
  misc_feature 1..21: note = n-mer motif encoding polynucleotide
attgctcatgtgtctactaat

SEQ ID NO: 6072 - DNA, 21 bp, synthetic construct
  source 1..21: mol_type = other DNA
  misc_feature 1..21: note = n-mer motif encoding polynucleotide
aacggtccgaccggatccgcc

SEQ ID NO: 6073 - DNA, 21 bp, synthetic construct
  misc_feature 1..21: note = n-mer motif encoding polynucleotide
  source 1..21: mol_type = other DNA
tctactcatcatgctgatcgt

SEQ ID NO: 6074 - DNA, 21 bp, synthetic construct
  source 1..21: mol_type = other DNA
  misc_feature 1..21: note = n-mer motif encoding polynucleotide
ggttcgcagtatgggcggcat

SEQ ID NO: 6075 - DNA, 21 bp, synthetic construct
  source 1..21: mol_type = other DNA
  misc_feature 1..21: note = n-mer motif encoding polynucleotide
accggaacggctacactccca

SEQ ID NO: 6076 - DNA, 21 bp, synthetic construct
  source 1..21: mol_type = other DNA
  misc_feature 1..21: note = n-mer motif encoding polynucleotide
aaagcccacgttgtagaaata

SEQ ID NO: 6077 - DNA, 21 bp, synthetic construct
  source 1..21: mol_type = other DNA
  misc_feature 1..21: note = n-mer motif encoding polynucleotide
acttcgcagggtaggagtcct

SEQ ID NO: 6078 - DNA, 21 bp, synthetic construct
  misc_feature 1..21: note = n-mer motif encoding polynucleotide
  source 1..21: mol_type = other DNA
ttatcctccgaatcacccagg

SEQ ID NO: 6079 - DNA, 21 bp, synthetic construct
  misc_feature 1..21: note = n-mer motif encoding polynucleotide
  source 1..21: mol_type = other DNA
accggggttcgagaaaccata

SEQ ID NO: 6080 - DNA, 21 bp, synthetic construct
  misc_feature 1..21: note = n-mer motif encoding polynucleotide
  source 1..21: mol_type = other DNA
atggatactgagctttatagg

SEQ ID NO: 6081 - DNA, 21 bp, synthetic construct
  source 1..21: mol_type = other DNA
  misc_feature 1..21: note = n-mer motif encoding polynucleotide
acacctgaagcgagcgctcgc

SEQ ID NO: 6082 - DNA, 21 bp, synthetic construct
  misc_feature 1..21: note = n-mer motif encoding polynucleotide
  source 1..21: mol_type = other DNA
cacgacttgaaccacggaaaa

SEQ ID NO: 6083 - DNA, 21 bp, synthetic construct
  source 1..21: mol_type = other DNA
  misc_feature 1..21: note = n-mer motif encoding polynucleotide
cttactggtcagaatgcgatt

SEQ ID NO: 6084 - DNA, 21 bp, synthetic construct
  misc_feature 1..21: note = n-mer motif encoding polynucleotide
  source 1..21: mol_type = other DNA
accgtcggatcgaacagtata

SEQ ID NO: 6085 - DNA, 21 bp, synthetic construct
  misc_feature 1..21: note = n-mer motif encoding polynucleotide
  source 1..21: mol_type = other DNA
catactgtgggggctatgcat

SEQ ID NO: 6086 - DNA, 21 bp, synthetic construct
  misc_feature 1..21: note = n-mer motif encoding polynucleotide
  source 1..21: mol_type = other DNA
gaacgagtcaacgggatggca

SEQ ID NO: 6087 - DNA, 21 bp, synthetic construct
  misc_feature 1..21: note = n-mer motif encoding polynucleotide
  source 1..21: mol_type = other DNA
tccgaaccccttagagttgga

SEQ ID NO: 6088 - DNA, 21 bp, synthetic construct
  source 1..21: mol_type = other DNA
  misc_feature 1..21: note = n-mer motif encoding polynucleotide
gtctctaacgtcctctacagc

SEQ ID NO: 6089 - DNA, 21 bp, synthetic construct
  misc_feature 1..21: note = n-mer motif encoding polynucleotide
  source 1..21: mol_type = other DNA
ttctcctccggaacaaccata

SEQ ID NO: 6090 - DNA, 21 bp, synthetic construct
  source 1..21: mol_type = other DNA
  misc_feature 1..21: note = n-mer motif encoding polynucleotide
acaaacctaagtcaatcggcc

SEQ ID NO: 6091 - DNA, 21 bp, synthetic construct
  misc_feature 1..21: note = n-mer motif encoding polynucleotide
  source 1..21: mol_type = other DNA
cctaatactgctagtaatttt

SEQ ID NO: 6092 - DNA, 21 bp, synthetic construct
  source 1..21: mol_type = other DNA
  misc_feature 1..21: note = n-mer motif encoding polynucleotide
tgcggcctgaactgcggtaaa

SEQ ID NO: 6093 - DNA, 21 bp, synthetic construct
  source 1..21: mol_type = other DNA
  misc_feature 1..21: note = n-mer motif encoding polynucleotide
ccgaccggaggctcaccacca

SEQ ID NO: 6094 - DNA, 21 bp, synthetic construct
  misc_feature 1..21: note = n-mer motif encoding polynucleotide
  source 1..21: mol_type = other DNA
tacctagaatccaactacacc

SEQ ID NO: 6095 - DNA, 21 bp, synthetic construct
  source 1..21: mol_type = other DNA
  misc_feature 1..21: note = n-mer motif encoding polynucleotide
acattagaaacaacccgcagc

SEQ ID NO: 6096 - DNA, 21 bp, synthetic construct
  misc_feature 1..21: note = n-mer motif encoding polynucleotide
  source 1..21: mol_type = other DNA
tccgctaacgaacacaaccac

SEQ ID NO: 6097 - DNA, 21 bp, synthetic construct
  misc_feature 1..21: note = n-mer motif encoding polynucleotide
  source 1..21: mol_type = other DNA
gcacgagtggacaccaaccaa

SEQ ID NO: 6098 - DNA, 21 bp, synthetic construct
  source 1..21: mol_type = other DNA
  misc_feature 1..21: note = n-mer motif encoding polynucleotide
aacgtggtgaaaaacaacaca

SEQ ID NO: 6099 - DNA, 21 bp, synthetic construct
  misc_feature 1..21: note = n-mer motif encoding polynucleotide
  source 1..21: mol_type = other DNA
ggttcttattctgatggtagt

SEQ ID NO: 6100 - DNA, 21 bp, synthetic construct
  misc_feature 1..21: note = n-mer motif encoding polynucleotide
  source 1..21: mol_type = other DNA
cccggtaacggacaaagtccg

SEQ ID NO: 6101 - DNA, 21 bp, synthetic construct
  misc_feature 1..21: note = n-mer motif encoding polynucleotide
  source 1..21: mol_type = other DNA
tcgggggtaaacttcggagta

SEQ ID NO: 6102 - DNA, 21 bp, synthetic construct
  source 1..21: mol_type = other DNA
  misc_feature 1..21: note = n-mer motif encoding polynucleotide
cgaatcaacgcagcaatcgac

SEQ ID NO: 6103 - DNA, 21 bp, synthetic construct
  misc_feature 1..21: note = n-mer motif encoding polynucleotide
  source 1..21: mol_type = other DNA
caagctgggaacgcgccaagg

SEQ ID NO: 6104 - DNA, 21 bp, synthetic construct
  source 1..21: mol_type = other DNA
  misc_feature 1..21: note = n-mer motif encoding polynucleotide
cagtcggggtctctggtgccg

SEQ ID NO: 6105 - DNA, 21 bp, synthetic construct
  misc_feature 1..21: note = n-mer motif encoding polynucleotide
  source 1..21: mol_type = other DNA
ttctcaacgcaagacataagc

SEQ ID NO: 6106 - DNA, 21 bp, synthetic construct
  source 1..21: mol_type = other DNA
  misc_feature 1..21: note = n-mer motif encoding polynucleotide
gtgaatccgcatcctgcgcag

SEQ ID NO: 6107 - DNA, 21 bp, synthetic construct
  misc_feature 1..21: note = n-mer motif encoding polynucleotide
  source 1..21: mol_type = other DNA
aaaggccacgcctacgaagcc

SEQ ID NO: 6108 - DNA, 21 bp, synthetic construct
  misc_feature 1..21: note = n-mer motif encoding polynucleotide
  source 1..21: mol_type = other DNA
gaagacagtatgagattctct

SEQ ID NO: 6109 - DNA, 21 bp, synthetic construct
  misc_feature 1..21: note = n-mer motif encoding polynucleotide
  source 1..21: mol_type = other DNA
ggtaggaatgagagtccggag

SEQ ID NO: 6110 - DNA, 21 bp, synthetic construct
  misc_feature 1..21: note = n-mer motif encoding polynucleotide
  source 1..21: mol_type = other DNA
tccgacggatcgaaactacta

SEQ ID NO: 6111 - DNA, 21 bp, synthetic construct
  source 1..21: mol_type = other DNA
  misc_feature 1..21: note = n-mer motif encoding polynucleotide
actctctcaggctacatgaga

SEQ ID NO: 6112 - DNA, 21 bp, synthetic construct
  misc_feature 1..21: note = n-mer motif encoding polynucleotide
  source 1..21: mol_type = other DNA
gatattcataatccgcgtacg

SEQ ID NO: 6113 - DNA, 21 bp, synthetic construct
  misc_feature 1..21: note = n-mer motif encoding polynucleotide
  source 1..21: mol_type = other DNA
tgggccaaagacgtcaacgtc

SEQ ID NO: 6114 - DNA, 21 bp, synthetic construct
  misc_feature 1..21: note = n-mer motif encoding polynucleotide
  source 1..21: mol_type = other DNA
gctgtggggcggtcggatgat

SEQ ID NO: 6115 - DNA, 21 bp, synthetic construct
  source 1..21: mol_type = other DNA
  misc_feature 1..21: note = n-mer motif encoding polynucleotide
aaagaaaaaaccacccgcgaa

SEQ ID NO: 6116 - DNA, 21 bp, synthetic construct
  misc_feature 1..21: note = n-mer motif encoding polynucleotide
  source 1..21: mol_type = other DNA
ctgctccaatcgacctacttg

SEQ ID NO: 6117 - DNA, 21 bp, synthetic construct
  misc_feature 1..21: note = n-mer motif encoding polynucleotide
  source 1..21: mol_type = other DNA
aagtctaatttggagggtaag

SEQ ID NO: 6118 - DNA, 21 bp, synthetic construct
  source 1..21: mol_type = other DNA
  misc_feature 1..21: note = n-mer motif encoding polynucleotide
acgaggacgccttttctgggg

SEQ ID NO: 6119 - DNA, 21 bp, synthetic construct
  misc_feature 1..21: note = n-mer motif encoding polynucleotide
  source 1..21: mol_type = other DNA
cagtcggatacgacttcgatt

SEQ ID NO: 6120 - DNA, 21 bp, synthetic construct
  source 1..21: mol_type = other DNA
  misc_feature 1..21: note = n-mer motif encoding polynucleotide
gcgtggtctcaagtcctgacg

SEQ ID NO: 6121 - DNA, 21 bp, synthetic construct
  misc_feature 1..21: note = n-mer motif encoding polynucleotide
  source 1..21: mol_type = other DNA
actcaagaacgaccactaatc

SEQ ID NO: 6122 - DNA, 21 bp, synthetic construct
  misc_feature 1..21: note = n-mer motif encoding polynucleotide
  source 1..21: mol_type = other DNA
gatgataagactggtcggtat

SEQ ID NO: 6123 - DNA, 21 bp, synthetic construct
  misc_feature 1..21: note = n-mer motif encoding polynucleotide
  source 1..21: mol_type = other DNA
tttccttcgcataatggggcg

SEQ ID NO: 6124 - DNA, 21 bp, synthetic construct
  misc_feature 1..21: note = n-mer motif encoding polynucleotide
  source 1..21: mol_type = other DNA
atgctgtctcaagtcttaaca

SEQ ID NO: 6125 - DNA, 21 bp, synthetic construct
  misc_feature 1..21: note = n-mer motif encoding polynucleotide
  source 1..21: mol_type = other DNA
tctgtgacgactaatctgatg

SEQ ID NO: 6126 - DNA, 21 bp, synthetic construct
  source 1..21: mol_type = other DNA
  misc_feature 1..21: note = n-mer motif encoding polynucleotide
gaacacaactcaaaaacttac

SEQ ID NO: 6127 - DNA, 21 bp, synthetic construct
  misc_feature 1..21: note = n-mer motif encoding polynucleotide
  source 1..21: mol_type = other DNA
tatgcgcatcctgtgactcat

SEQ ID NO: 6128 - DNA, 21 bp, synthetic construct
  misc_feature 1..21: note = n-mer motif encoding polynucleotide
  source 1..21: mol_type = other DNA
cctaatccgtctccgaggcag

SEQ ID NO: 6129 - DNA, 21 bp, synthetic construct
  source 1..21: mol_type = other DNA
  misc_feature 1..21: note = n-mer motif encoding polynucleotide
catatgggtttgaatgagctt

SEQ ID NO: 6130 - DNA, 21 bp, synthetic construct
  source 1..21: mol_type = other DNA
  misc_feature 1..21: note = n-mer motif encoding polynucleotide
aacagtttgcaagcaagtgca

SEQ ID NO: 6131 - DNA, 21 bp, synthetic construct
  misc_feature 1..21: note = n-mer motif encoding polynucleotide
  source 1..21: mol_type = other DNA
gacctcggtacggctagaacc

SEQ ID NO: 6132 - DNA, 21 bp, synthetic construct
  misc_feature 1..21: note = n-mer motif encoding polynucleotide
  source 1..21: mol_type = other DNA
tacgacagccgactctacgcg

SEQ ID NO: 6133 - DNA, 21 bp, synthetic construct
  misc_feature 1..21: note = n-mer motif encoding polynucleotide
  source 1..21: mol_type = other DNA
ccgaagcctgggacgggggag

SEQ ID NO: 6134 - DNA, 21 bp, synthetic construct
  misc_feature 1..21: note = n-mer motif encoding polynucleotide
  source 1..21: mol_type = other DNA
agtctgaatggggtgttggtt

SEQ ID NO: 6135 - DNA, 21 bp, synthetic construct
  source 1..21: mol_type = other DNA
  misc_feature 1..21: note = n-mer motif encoding polynucleotide
cagtctaatttggttattaat

SEQ ID NO: 6136 - DNA, 21 bp, synthetic construct
  source 1..21: mol_type = other DNA
  misc_feature 1..21: note = n-mer motif encoding polynucleotide
gcgtctccggcgcagaccggc

SEQ ID NO: 6137 - DNA, 21 bp, synthetic construct
  source 1..21: mol_type = other DNA
  misc_feature 1..21: note = n-mer motif encoding polynucleotide
aacatgaccaacgaaaacgga

SEQ ID NO: 6138 - DNA, 21 bp, synthetic construct
  source 1..21: mol_type = other DNA
  misc_feature 1..21: note = n-mer motif encoding polynucleotide
tcacttcggacggacgaattc

SEQ ID NO: 6139 - DNA, 21 bp, synthetic construct
  source 1..21: mol_type = other DNA
  misc_feature 1..21: note = n-mer motif encoding polynucleotide
atattggacaaccaccgtttc

SEQ ID NO: 6140 - DNA, 21 bp, synthetic construct
  misc_feature 1..21: note = n-mer motif encoding polynucleotide
  source 1..21: mol_type = other DNA
ttgattaatatgagtcagaat

SEQ ID NO: 6141 - DNA, 21 bp, synthetic construct
  source 1..21: mol_type = other DNA
  misc_feature 1..21: note = n-mer motif encoding polynucleotide
ccgcaagacgtccgccaaaca

SEQ ID NO: 6142 - DNA, 21 bp, synthetic construct
  misc_feature 1..21: note = n-mer motif encoding polynucleotide
  source 1..21: mol_type = other DNA
cccttcgtagcgaacgaacca

SEQ ID NO: 6143 - DNA, 21 bp, synthetic construct
  source 1..21: mol_type = other DNA
  misc_feature 1..21: note = n-mer motif encoding polynucleotide
aatattaatgatactaagaat

SEQ ID NO: 6144 - DNA, 21 bp, synthetic construct
  source 1..21: mol_type = other DNA
  misc_feature 1..21: note = n-mer motif encoding polynucleotide
aattttagtagtggtgatgtt

SEQ ID NO: 6145 - DNA, 21 bp, synthetic construct
  source 1..21: mol_type = other DNA
  misc_feature 1..21: note = n-mer motif encoding polynucleotide
gaacgaaacggactaatagaa

SEQ ID NO: 6146 - DNA, 21 bp, synthetic construct
  source 1..21: mol_type = other DNA
  misc_feature 1..21: note = n-mer motif encoding polynucleotide
aattctcatgttcctaataat

SEQ ID NO: 6147 - DNA, 21 bp, synthetic construct
  misc_feature 1..21: note = n-mer motif encoding polynucleotide
  source 1..21: mol_type = other DNA
aacacaaccggtagctcgggc

SEQ ID NO: 6148 - DNA, 21 bp, synthetic construct
  misc_feature 1..21: note = n-mer motif encoding polynucleotide
  source 1..21: mol_type = other DNA
tcaaccagaaaagaacacgac

SEQ ID NO: 6149 - DNA, 21 bp, synthetic construct
  misc_feature 1..21: note = n-mer motif encoding polynucleotide
  source 1..21: mol_type = other DNA
gctgctaatcctagtacggag

SEQ ID NO: 6150 - DNA, 21 bp, synthetic construct
  misc_feature 1..21: note = n-mer motif encoding polynucleotide
  source 1..21: mol_type = other DNA
tcgggtatgaatagtaataag

SEQ ID NO: 6151 - DNA, 21 bp, synthetic construct
  misc_feature 1..21: note = n-mer motif encoding polynucleotide
  source 1..21: mol_type = other DNA
aagacgcttgataataatgct

SEQ ID NO: 6152 - DNA, 21 bp, synthetic construct
  misc_feature 1..21: note = n-mer motif encoding polynucleotide
  source 1..21: mol_type = other DNA
accgtaaaacaaacaagtccg

SEQ ID NO: 6153 - DNA, 21 bp, synthetic construct
  source 1..21: mol_type = other DNA
  misc_feature 1..21: note = n-mer motif encoding polynucleotide
atttctcaggtgtcttttaat

SEQ ID NO: 6154 - DNA, 21 bp, synthetic construct
  source 1..21: mol_type = other DNA
  misc_feature 1..21: note = n-mer motif encoding polynucleotide
ttagaagtaaacctgcaaacg

SEQ ID NO: 6155 - DNA, 21 bp, synthetic construct
  source 1..21: mol_type = other DNA
  misc_feature 1..21: note = n-mer motif encoding polynucleotide
gaaatgcaaaccaaaaacgcc

SEQ ID NO: 6156 - DNA, 21 bp, synthetic construct
  misc_feature 1..21: note = n-mer motif encoding polynucleotide
  source 1..21: mol_type = other DNA
gccgacaacagaaacgacaaa

SEQ ID NO: 6157 - DNA, 21 bp, synthetic construct
  misc_feature 1..21: note = n-mer motif encoding polynucleotide
  source 1..21: mol_type = other DNA
gcgtatgatacgctgaatagt

SEQ ID NO: 6158 - DNA, 21 bp, synthetic construct
  misc_feature 1..21: note = n-mer motif encoding polynucleotide
  source 1..21: mol_type = other DNA
acgattcaggatcatattaag

SEQ ID NO: 6159 - DNA, 21 bp, synthetic construct
  source 1..21: mol_type = other DNA
  misc_feature 1..21: note = n-mer motif encoding polynucleotide
gaccccactaaagttggatcc

SEQ ID NO: 6160 - DNA, 21 bp, synthetic construct
  misc_feature 1..21: note = n-mer motif encoding polynucleotide
  source 1..21: mol_type = other DNA
tccctccaacgaacccccgac

SEQ ID NO: 6161 - DNA, 21 bp, synthetic construct
  source 1..21: mol_type = other DNA
  misc_feature 1..21: note = n-mer motif encoding polynucleotide
gcaaacgactctgccaaaaca

SEQ ID NO: 6162 - DNA, 21 bp, synthetic construct
  misc_feature 1..21: note = n-mer motif encoding polynucleotide
  source 1..21: mol_type = other DNA
aaaaaagtcgaacaagaacca

SEQ ID NO: 6163 - DNA, 21 bp, synthetic construct
  source 1..21: mol_type = other DNA
  misc_feature 1..21: note = n-mer motif encoding polynucleotide
gcaagtcgggacctgggacaa

SEQ ID NO: 6164 - DNA, 21 bp, synthetic construct
  misc_feature 1..21: note = n-mer motif encoding polynucleotide
  source 1..21: mol_type = other DNA
tgggagagtgataagtttcgt

SEQ ID NO: 6165 - DNA, 21 bp, synthetic construct
  source 1..21: mol_type = other DNA
  misc_feature 1..21: note = n-mer motif encoding polynucleotide
aaccgcggaacagaagtttac

SEQ ID NO: 6166 - DNA, 21 bp, synthetic construct
  source 1..21: mol_type = other DNA
  misc_feature 1..21: note = n-mer motif encoding polynucleotide
aatattagtagtattaatcag

SEQ ID NO: 6167 - DNA, 21 bp, synthetic construct
  misc_feature 1..21: note = n-mer motif encoding polynucleotide
  source 1..21: mol_type = other DNA
gcctcgaaaggcttcggccac

SEQ ID NO: 6168 - DNA, 21 bp, synthetic construct
  source 1..21: mol_type = other DNA
  misc_feature 1..21: note = n-mer motif encoding polynucleotide
cagtcgcagaatgtgactcag

SEQ ID NO: 6169 - DNA, 21 bp, synthetic construct
  misc_feature 1..21: note = n-mer motif encoding polynucleotide
  source 1..21: mol_type = other DNA
aacggataccaactacaaatc

SEQ ID NO: 6170 - DNA, 21 bp, synthetic construct
  misc_feature 1..21: note = n-mer motif encoding polynucleotide
  source 1..21: mol_type = other DNA
tgtactaatgcgtcggatctt

SEQ ID NO: 6171 - DNA, 21 bp, synthetic construct
  misc_feature 1..21: note = n-mer motif encoding polynucleotide
  source 1..21: mol_type = other DNA
accgtcgcctcgcccaacacc

SEQ ID NO: 6172 - DNA, 21 bp, synthetic construct
  source 1..21: mol_type = other DNA
  misc_feature 1..21: note = n-mer motif encoding polynucleotide
aatactgctccgccgaatcat

SEQ ID NO: 6173 - DNA, 21 bp, synthetic construct
  misc_feature 1..21: note = n-mer motif encoding polynucleotide
  source 1..21: mol_type = other DNA
ctttctcaacaacgcgactac

SEQ ID NO: 6174 - DNA, 21 bp, synthetic construct
  source 1..21: mol_type = other DNA
  misc_feature 1..21: note = n-mer motif encoding polynucleotide
tggaatcagaatgtgtctcat

SEQ ID NO: 6175 - DNA, 21 bp, synthetic construct
  source 1..21: mol_type = other DNA
  misc_feature 1..21: note = n-mer motif encoding polynucleotide
acaggtagttcagacagatta

SEQ ID NO: 6176 - DNA, 21 bp, synthetic construct
  source 1..21: mol_type = other DNA
  misc_feature 1..21: note = n-mer motif encoding polynucleotide
aacacaacgccacctaaccac

SEQ ID NO: 6177 - DNA, 21 bp, synthetic construct
  source 1..21: mol_type = other DNA
  misc_feature 1..21: note = n-mer motif encoding polynucleotide
gtggtcgactcaacatacccg

SEQ ID NO: 6178 - DNA, 21 bp, synthetic construct
  source 1..21: mol_type = other DNA
  misc_feature 1..21: note = n-mer motif encoding polynucleotide
acggatgctacggggaggcat

SEQ ID NO: 6179 - DNA, 21 bp, synthetic construct
  source 1..21: mol_type = other DNA
  misc_feature 1..21: note = n-mer motif encoding polynucleotide
ttgtttactgctgggagtact

SEQ ID NO: 6180 - DNA, 21 bp, synthetic construct
  source 1..21: mol_type = other DNA
  misc_feature 1..21: note = n-mer motif encoding polynucleotide
ttgcgtgatcagactagtatg

SEQ ID NO: 6181 - DNA, 21 bp, synthetic construct
  misc_feature 1..21: note = n-mer motif encoding polynucleotide
  source 1..21: mol_type = other DNA
atcgaaacggaccgccaccgg

SEQ ID NO: 6182 - DNA, 21 bp, synthetic construct
  misc_feature 1..21: note = n-mer motif encoding polynucleotide
  source 1..21: mol_type = other DNA
agtgggcctgagaatacgttg

SEQ ID NO: 6183 - DNA, 21 bp, synthetic construct
  misc_feature 1..21: note = n-mer motif encoding polynucleotide
  source 1..21: mol_type = other DNA
gacaaccaaaacgccgacagg

SEQ ID NO: 6184 - DNA, 21 bp, synthetic construct
  source 1..21: mol_type = other DNA
  misc_feature 1..21: note = n-mer motif encoding polynucleotide
catgatggttatgttcctaat

SEQ ID NO: 6185 - DNA, 21 bp, synthetic construct
  misc_feature 1..21: note = n-mer motif encoding polynucleotide
  source 1..21: mol_type = other DNA
catatgtctagttattcgtcg

SEQ ID NO: 6186 - DNA, 21 bp, synthetic construct
  source 1..21: mol_type = other DNA
  misc_feature 1..21: note = n-mer motif encoding polynucleotide
agtcgtctgcagactcagcag

SEQ ID NO: 6187 - DNA, 21 bp, synthetic construct
  source 1..21: mol_type = other DNA
  misc_feature 1..21: note = n-mer motif encoding polynucleotide
tcatacacagcaggaagaccc

SEQ ID NO: 6188 - DNA, 21 bp, synthetic construct
  misc_feature 1..21: note = n-mer motif encoding polynucleotide
  source 1..21: mol_type = other DNA
gtgcagcagaataatattaat

SEQ ID NO: 6189 - DNA, 21 bp, synthetic construct
  source 1..21: mol_type = other DNA
  misc_feature 1..21: note = n-mer motif encoding polynucleotide
gatgcgaaggctcttacgact

SEQ ID NO: 6190 - DNA, 21 bp, synthetic construct
  misc_feature 1..21: note = n-mer motif encoding polynucleotide
  source 1..21: mol_type = other DNA
aaggatgagcatcttcattat

SEQ ID NO: 6191 - DNA, 21 bp, synthetic construct
  source 1..21: mol_type = other DNA
  misc_feature 1..21: note = n-mer motif encoding polynucleotide
cacggtgaccgaacagcttta

SEQ ID NO: 6192 - DNA, 21 bp, synthetic construct
  misc_feature 1..21: note = n-mer motif encoding polynucleotide
  source 1..21: mol_type = other DNA
aattttactattacggaggcg

SEQ ID NO: 6193 - DNA, 21 bp, synthetic construct
  misc_feature 1..21: note = n-mer motif encoding polynucleotide
  source 1..21: mol_type = other DNA
gacactcacatgaacaaactg

SEQ ID NO: 6194 - DNA, 21 bp, synthetic construct
  source 1..21: mol_type = other DNA
  misc_feature 1..21: note = n-mer motif encoding polynucleotide
caaccaggagccccccaaacc

SEQ ID NO: 6195 - DNA, 21 bp, synthetic construct
  source 1..21: mol_type = other DNA
  misc_feature 1..21: note = n-mer motif encoding polynucleotide
ggggaagcacgccgagaagcc

SEQ ID NO: 6196 - DNA, 21 bp, synthetic construct
  source 1..21: mol_type = other DNA
  misc_feature 1..21: note = n-mer motif encoding polynucleotide
aagtctcttagtagtgatgat

SEQ ID NO: 6197 - DNA, 21 bp, synthetic construct
  misc_feature 1..21: note = n-mer motif encoding polynucleotide
  source 1..21: mol_type = other DNA
atgaatacgacttataatgag

SEQ ID NO: 6198 - DNA, 21 bp, synthetic construct
  source 1..21: mol_type = other DNA
  misc_feature 1..21: note = n-mer motif encoding polynucleotide
gcggccgcactagaaacaata

SEQ ID NO: 6199 - DNA, 21 bp, synthetic construct
  source 1..21: mol_type = other DNA
  misc_feature 1..21: note = n-mer motif encoding polynucleotide
aacgtcgctccctacagtagc

SEQ ID NO: 6200 - DNA, 21 bp, synthetic construct
  misc_feature 1..21: note = n-mer motif encoding polynucleotide
  source 1..21: mol_type = other DNA
tctgcgggtatggtgagtctg

SEQ ID NO: 6201 - DNA, 21 bp, synthetic construct
  source 1..21: mol_type = other DNA
  misc_feature 1..21: note = n-mer motif encoding polynucleotide
tgcgacttgtcacaatcatgc

SEQ ID NO: 6202 - DNA, 21 bp, synthetic construct
  misc_feature 1..21: note = n-mer motif encoding polynucleotide
  source 1..21: mol_type = other DNA
gttttgattacgatgagttcg

SEQ ID NO: 6203 - DNA, 21 bp, synthetic construct
  misc_feature 1..21: note = n-mer motif encoding polynucleotide
  source 1..21: mol_type = other DNA
caagttggggctctaatggtt

SEQ ID NO: 6204 - DNA, 21 bp, synthetic construct
  misc_feature 1..21: note = n-mer motif encoding polynucleotide
  source 1..21: mol_type = other DNA
caacgtacctcggaagcgcca

SEQ ID NO: 6205 - DNA, 21 bp, synthetic construct
  misc_feature 1..21: note = n-mer motif encoding polynucleotide
  source 1..21: mol_type = other DNA
ttgggtaatggtagttctttg

SEQ ID NO: 6206 - DNA, 21 bp, synthetic construct
  misc_feature 1..21: note = n-mer motif encoding polynucleotide
  source 1..21: mol_type = other DNA
cctagtgtccgtttgccctta

SEQ ID NO: 6207 - DNA, 21 bp, synthetic construct
  source 1..21: mol_type = other DNA
  misc_feature 1..21: note = n-mer motif encoding polynucleotide
gattctgctccgagtactatt

SEQ ID NO: 6208 - DNA, 21 bp, synthetic construct
  source 1..21: mol_type = other DNA
  misc_feature 1..21: note = n-mer motif encoding polynucleotide
aattataatggggttaatgtg

SEQ ID NO: 6209 - DNA, 21 bp, synthetic construct
  source 1..21: mol_type = other DNA
  misc_feature 1..21: note = n-mer motif encoding polynucleotide
tcggctcatcagacgccgacg

SEQ ID NO: 6210 - DNA, 21 bp, synthetic construct
  misc_feature 1..21: note = n-mer motif encoding polynucleotide
  source 1..21: mol_type = other DNA
gatcatagtaagcagatttcg

SEQ ID NO: 6211 - DNA, 21 bp, synthetic construct
  source 1..21: mol_type = other DNA
  misc_feature 1..21: note = n-mer motif encoding polynucleotide
gccgccagcttgtcgcaaagc

SEQ ID NO: 6212 - DNA, 21 bp, synthetic construct
  source 1..21: mol_type = other DNA
  misc_feature 1..21: note = n-mer motif encoding polynucleotide
cacgccgacgttggcatgagc

SEQ ID NO: 6213 - DNA, 21 bp, synthetic construct
  source 1..21: mol_type = other DNA
  misc_feature 1..21: note = n-mer motif encoding polynucleotide
cacgtgacagtaacgttaaac

SEQ ID NO: 6214 - DNA, 21 bp, synthetic construct
  source 1..21: mol_type = other DNA
  misc_feature 1..21: note = n-mer motif encoding polynucleotide
aattctacgcatattaattcg

SEQ ID NO: 6215 - DNA, 21 bp, synthetic construct
  source 1..21: mol_type = other DNA
  misc_feature 1..21: note = n-mer motif encoding polynucleotide
ctggggcttgctggtcaggtt

SEQ ID NO: 6216 - DNA, 21 bp, synthetic construct
  source 1..21: mol_type = other DNA
  misc_feature 1..21: note = n-mer motif encoding polynucleotide
agcagtcaagcccacggccca

SEQ ID NO: 6217 - DNA, 21 bp, synthetic construct
  misc_feature 1..21: note = n-mer motif encoding polynucleotide
  source 1..21: mol_type = other DNA
gcttttaagtcgggtagtatt

SEQ ID NO: 6218 - DNA, 21 bp, synthetic construct
  misc_feature 1..21: note = n-mer motif encoding polynucleotide
  source 1..21: mol_type = other DNA
cactccccatcccacgactcg

SEQ ID NO: 6219 - DNA, 21 bp, synthetic construct
  source 1..21: mol_type = other DNA
  misc_feature 1..21: note = n-mer motif encoding polynucleotide
ccaaacggcgaaagttcgcga

SEQ ID NO: 6220 - DNA, 21 bp, synthetic construct
  misc_feature 1..21: note = n-mer motif encoding polynucleotide
  source 1..21: mol_type = other DNA
attcttacgcctttggataag

SEQ ID NO: 6221 - DNA, 21 bp, synthetic construct
  source 1..21: mol_type = other DNA
  misc_feature 1..21: note = n-mer motif encoding polynucleotide
tccgcctcttactccaggatg

SEQ ID NO: 6222 - DNA, 21 bp, synthetic construct
  source 1..21: mol_type = other DNA
  misc_feature 1..21: note = n-mer motif encoding polynucleotide
gaggcgttgcatgatcggaat

SEQ ID NO: 6223 - DNA, 21 bp, synthetic construct
  source 1..21: mol_type = other DNA
  misc_feature 1..21: note = n-mer motif encoding polynucleotide
ggtgaacaacacaacgccccc

SEQ ID NO: 6224 - DNA, 21 bp, synthetic construct
  source 1..21: mol_type = other DNA
  misc_feature 1..21: note = n-mer motif encoding polynucleotide
gggaatatggttacgcctaat

SEQ ID NO: 6225 - DNA, 21 bp, synthetic construct
  source 1..21: mol_type = other DNA
  misc_feature 1..21: note = n-mer motif encoding polynucleotide
aacgctctcctcaacgcacct

SEQ ID NO: 6226 - DNA, 21 bp, synthetic construct
  source 1..21: mol_type = other DNA
  misc_feature 1..21: note = n-mer motif encoding polynucleotide
gcaagtgacctacaaatgacg

SEQ ID NO: 6227 - DNA, 21 bp, synthetic construct
  misc_feature 1..21: note = n-mer motif encoding polynucleotide
  source 1..21: mol_type = other DNA
tcgtatgatatgcatacgaat

SEQ ID NO: 6228 - DNA, 21 bp, synthetic construct
  source 1..21: mol_type = other DNA
  misc_feature 1..21: note = n-mer motif encoding polynucleotide
aatatgtcgcatagtactctg

SEQ ID NO: 6229 - DNA, 21 bp, synthetic construct
  source 1..21: mol_type = other DNA
  misc_feature 1..21: note = n-mer motif encoding polynucleotide
actgccaacaaccactctccg

SEQ ID NO: 6230 - DNA, 21 bp, synthetic construct
  source 1..21: mol_type = other DNA
  misc_feature 1..21: note = n-mer motif encoding polynucleotide
caagccccgccaacagcacaa

SEQ ID NO: 6231 - DNA, 21 bp, synthetic construct
  misc_feature 1..21: note = n-mer motif encoding polynucleotide
  source 1..21: mol_type = other DNA
aactaccacggagacaacgtt

SEQ ID NO: 6232 - DNA, 21 bp, synthetic construct
  source 1..21: mol_type = other DNA
  misc_feature 1..21: note = n-mer motif encoding polynucleotide
agggatagtactattagtcgg

SEQ ID NO: 6233 - DNA, 21 bp, synthetic construct
  source 1..21: mol_type = other DNA
  misc_feature 1..21: note = n-mer motif encoding polynucleotide
gtttcttcgcctaatggtacg

SEQ ID NO: 6234 - DNA, 21 bp, synthetic construct
  source 1..21: mol_type = other DNA
  misc_feature 1..21: note = n-mer motif encoding polynucleotide
tcccgaatcacggtgaacgca

SEQ ID NO: 6235 - DNA, 21 bp, synthetic construct
  source 1..21: mol_type = other DNA
  misc_feature 1..21: note = n-mer motif encoding polynucleotide
gtcggaacaacctcgaacggc

SEQ ID NO: 6236 - DNA, 21 bp, synthetic construct
  source 1..21: mol_type = other DNA
  misc_feature 1..21: note = n-mer motif encoding polynucleotide
catacgaatcagatgcagcct

SEQ ID NO: 6237 - DNA, 21 bp, synthetic construct
  misc_feature 1..21: note = n-mer motif encoding polynucleotide
  source 1..21: mol_type = other DNA
aaaagcaacgcgggattcggt

SEQ ID NO: 6238 - DNA, 21 bp, synthetic construct
  source 1..21: mol_type = other DNA
  misc_feature 1..21: note = n-mer motif encoding polynucleotide
aaagaaagcctcgaagacgtc

SEQ ID NO: 6239 - DNA, 21 bp, synthetic construct
  source 1..21: mol_type = other DNA
  misc_feature 1..21: note = n-mer motif encoding polynucleotide
gcgcaggttaataatcatgat

SEQ ID NO: 6240 - DNA, 21 bp, synthetic construct
  source 1..21: mol_type = other DNA
  misc_feature 1..21: note = n-mer motif encoding polynucleotide
aacgcttctacctacatggac

SEQ ID NO: 6241 - DNA, 21 bp, synthetic construct
  source 1..21: mol_type = other DNA
  misc_feature 1..21: note = n-mer motif encoding polynucleotide
acgtctgatacgaatgctagg

SEQ ID NO: 6242 - DNA, 21 bp, synthetic construct
  misc_feature 1..21: note = n-mer motif encoding polynucleotide
  source 1..21: mol_type = other DNA
gagagtcgtatgcgtagtatt

SEQ ID NO: 6243 - DNA, 21 bp, synthetic construct
  source 1..21: mol_type = other DNA
  misc_feature 1..21: note = n-mer motif encoding polynucleotide
cgtgttgaagacaccaactcc

SEQ ID NO: 6244 - DNA, 21 bp, synthetic construct
  source 1..21: mol_type = other DNA
  misc_feature 1..21: note = n-mer motif encoding polynucleotide
gcctctaaccacctacaagcc

SEQ ID NO: 6245 - DNA, 21 bp, synthetic construct
  source 1..21: mol_type = other DNA
  misc_feature 1..21: note = n-mer motif encoding polynucleotide
cgcttacacggctcagactcg

SEQ ID NO: 6246 - DNA, 21 bp, synthetic construct
  source 1..21: mol_type = other DNA
  misc_feature 1..21: note = n-mer motif encoding polynucleotide
accgtcgaacaaataaactcg

SEQ ID NO: 6247 - DNA, 21 bp, synthetic construct
  misc_feature 1..21: note = n-mer motif encoding polynucleotide
  source 1..21: mol_type = other DNA
aggtccgtaccatcaccacac

SEQ ID NO: 6248 - DNA, 21 bp, synthetic construct
  misc_feature 1..21: note = n-mer motif encoding polynucleotide
  source 1..21: mol_type = other DNA
gaatacctcgccctgggacac

SEQ ID NO: 6249 - DNA, 21 bp, synthetic construct
  misc_feature 1..21: note = n-mer motif encoding polynucleotide
  source 1..21: mol_type = other DNA
aatactaataatcaggagcag

SEQ ID NO: 6250 - DNA, 21 bp, synthetic construct
  misc_feature 1..21: note = n-mer motif encoding polynucleotide
  source 1..21: mol_type = other DNA
aactacggttccggacgaatc

SEQ ID NO: 6251 - DNA, 21 bp, synthetic construct
  source 1..21: mol_type = other DNA
  misc_feature 1..21: note = n-mer motif encoding polynucleotide
cgccacggggacacaccgatg

SEQ ID NO: 6252 - DNA, 21 bp, synthetic construct
  source 1..21: mol_type = other DNA
  misc_feature 1..21: note = n-mer motif encoding polynucleotide
aacgacaccatcggcagacca

SEQ ID NO: 6253 - DNA, 21 bp, synthetic construct
  misc_feature 1..21: note = n-mer motif encoding polynucleotide
  source 1..21: mol_type = other DNA
tatggggagcgtgctaggacg

SEQ ID NO: 6254 - DNA, 21 bp, synthetic construct
  misc_feature 1..21: note = n-mer motif encoding polynucleotide
  source 1..21: mol_type = other DNA
gttcttgggatgcagaggtct

SEQ ID NO: 6255 - DNA, 21 bp, synthetic construct
  source 1..21: mol_type = other DNA
  misc_feature 1..21: note = n-mer motif encoding polynucleotide
cttcattttcatgcttcgcag

SEQ ID NO: 6256 - DNA, 21 bp, synthetic construct
  misc_feature 1..21: note = n-mer motif encoding polynucleotide
  source 1..21: mol_type = other DNA
accgacacgctcagcgaaaga

SEQ ID NO: 6257 - DNA, 21 bp, synthetic construct
  source 1..21: mol_type = other DNA
  misc_feature 1..21: note = n-mer motif encoding polynucleotide
gggacaggtaccgttggatgg

SEQ ID NO: 6258 - DNA, 21 bp, synthetic construct
  misc_feature 1..21: note = n-mer motif encoding polynucleotide
  source 1..21: mol_type = other DNA
acagaaagccccaaactacta

SEQ ID NO: 6259 - DNA, 21 bp, synthetic construct
  misc_feature 1..21: note = n-mer motif encoding polynucleotide
  source 1..21: mol_type = other DNA
acgattaggagtgagggtttt

SEQ ID NO: 6260 - DNA, 21 bp, synthetic construct
  source 1..21: mol_type = other DNA
  misc_feature 1..21: note = n-mer motif encoding polynucleotide
gcgtctagttatattaataat

SEQ ID NO: 6261 - DNA, 21 bp, synthetic construct
  source 1..21: mol_type = other DNA
  misc_feature 1..21: note = n-mer motif encoding polynucleotide
ttacaccttgggttatcatct

SEQ ID NO: 6262 - DNA, 21 bp, synthetic construct
  source 1..21: mol_type = other DNA
  misc_feature 1..21: note = n-mer motif encoding polynucleotide
gtcactggcactaccccggga

SEQ ID NO: 6263 - DNA, 21 bp, synthetic construct
  source 1..21: mol_type = other DNA
  misc_feature 1..21: note = n-mer motif encoding polynucleotide
gtgacgtcgtctgctagtggt

SEQ ID NO: 6264 - DNA, 21 bp, synthetic construct
  misc_feature 1..21: note = n-mer motif encoding polynucleotide
  source 1..21: mol_type = other DNA
caaatgcacctacacatgcaa

SEQ ID NO: 6265 - DNA, 21 bp, synthetic construct
  source 1..21: mol_type = other DNA
  misc_feature 1..21: note = n-mer motif encoding polynucleotide
ggtaccatgagtctattaatg

SEQ ID NO: 6266 - DNA, 21 bp, synthetic construct
  source 1..21: mol_type = other DNA
  misc_feature 1..21: note = n-mer motif encoding polynucleotide
tgcgcatcagaagtttgccaa

SEQ ID NO: 6267 - DNA, 21 bp, synthetic construct
  source 1..21: mol_type = other DNA
  misc_feature 1..21: note = n-mer motif encoding polynucleotide
aatcttgtgatgagtgggacg

SEQ ID NO: 6268 - DNA, 21 bp, synthetic construct
  misc_feature 1..21: note = n-mer motif encoding polynucleotide
  source 1..21: mol_type = other DNA
caatcactcaaagacggcact

SEQ ID NO: 6269 - DNA, 21 bp, synthetic construct
  misc_feature 1..21: note = n-mer motif encoding polynucleotide
  source 1..21: mol_type = other DNA
gcgttgaatggttctggtatt

SEQ ID NO: 6270 - DNA, 21 bp, synthetic construct
  misc_feature 1..21: note = n-mer motif encoding polynucleotide
  source 1..21: mol_type = other DNA
agacacgtcgtccccgactcc

SEQ ID NO: 6271 - DNA, 21 bp, synthetic construct
  source 1..21: mol_type = other DNA
  misc_feature 1..21: note = n-mer motif encoding polynucleotide
ctgtatcatgattcgcatctt

SEQ ID NO: 6272 - DNA, 21 bp, synthetic construct
  misc_feature 1..21: note = n-mer motif encoding polynucleotide
  source 1..21: mol_type = other DNA
gggagtacgcctattacttct

SEQ ID NO: 6273 - DNA, 21 bp, synthetic construct
  source 1..21: mol_type = other DNA
  misc_feature 1..21: note = n-mer motif encoding polynucleotide
cccaacgaccaaatcagcgga

SEQ ID NO: 6274 - DNA, 21 bp, synthetic construct
  misc_feature 1..21: note = n-mer motif encoding polynucleotide
  source 1..21: mol_type = other DNA
agtggaaaacaagacaaatac

SEQ ID NO: 6275 - DNA, 21 bp, synthetic construct
  source 1..21: mol_type = other DNA
  misc_feature 1..21: note = n-mer motif encoding polynucleotide
agtgggcatgcttctcagggt

SEQ ID NO: 6276 - DNA, 21 bp, synthetic construct
  source 1..21: mol_type = other DNA
  misc_feature 1..21: note = n-mer motif encoding polynucleotide
aagatggggagtattgaggtt

SEQ ID NO: 6277 - DNA, 21 bp, synthetic construct
  source 1..21: mol_type = other DNA
  misc_feature 1..21: note = n-mer motif encoding polynucleotide
tcaactttagaccgaagcgaa

SEQ ID NO: 6278 - DNA, 21 bp, synthetic construct
  source 1..21: mol_type = other DNA
  misc_feature 1..21: note = n-mer motif encoding polynucleotide
acggagcttagtgagtatact

SEQ ID NO: 6279 - DNA, 21 bp, synthetic construct
  misc_feature 1..21: note = n-mer motif encoding polynucleotide
  source 1..21: mol_type = other DNA
gccaacggaggaggatacccc

SEQ ID NO: 6280 - DNA, 21 bp, synthetic construct
  misc_feature 1..21: note = n-mer motif encoding polynucleotide
  source 1..21: mol_type = other DNA
gtaaccgaatctaactctcta

SEQ ID NO: 6281 - DNA, 21 bp, synthetic construct
  source 1..21: mol_type = other DNA
  misc_feature 1..21: note = n-mer motif encoding polynucleotide
ccagtctacgaccgcgacgtc

SEQ ID NO: 6282 - DNA, 21 bp, synthetic construct
  misc_feature 1..21: note = n-mer motif encoding polynucleotide
  source 1..21: mol_type = other DNA
gataataataagcatggtact

SEQ ID NO: 6283 - DNA, 21 bp, synthetic construct
  source 1..21: mol_type = other DNA
  misc_feature 1..21: note = n-mer motif encoding polynucleotide
atctacgaaaccgtaaccttg

SEQ ID NO: 6284 - DNA, 21 bp, synthetic construct
  source 1..21: mol_type = other DNA
  misc_feature 1..21: note = n-mer motif encoding polynucleotide
actcagactggtcatgtttct

SEQ ID NO: 6285 - DNA, 21 bp, synthetic construct
  misc_feature 1..21: note = n-mer motif encoding polynucleotide
  source 1..21: mol_type = other DNA
caagccgacctcaggtacaaa

SEQ ID NO: 6286 - DNA, 21 bp, synthetic construct
  misc_feature 1..21: note = n-mer motif encoding polynucleotide
  source 1..21: mol_type = other DNA
tgtaagacgaataatgctggt

SEQ ID NO: 6287 - DNA, 21 bp, synthetic construct
  misc_feature 1..21: note = n-mer motif encoding polynucleotide
  source 1..21: mol_type = other DNA
gccggtcaccaacaactggcc

SEQ ID NO: 6288 - DNA, 21 bp, synthetic construct
  source 1..21: mol_type = other DNA
  misc_feature 1..21: note = n-mer motif encoding polynucleotide
gatagggatatggagggtgtt

SEQ ID NO: 6289 - DNA, 21 bp, synthetic construct
  source 1..21: mol_type = other DNA
  misc_feature 1..21: note = n-mer motif encoding polynucleotide
gatcagccggggtatgtgcgt

SEQ ID NO: 6290 - DNA, 21 bp, synthetic construct
  misc_feature 1..21: note = n-mer motif encoding polynucleotide
  source 1..21: mol_type = other DNA
gatgctatgcttgctcatccg

SEQ ID NO: 6291 - DNA, 21 bp, synthetic construct
  misc_feature 1..21: note = n-mer motif encoding polynucleotide
  source 1..21: mol_type = other DNA
gcccttaacctgtactccagc

SEQ ID NO: 6292 - DNA, 21 bp, synthetic construct
  source 1..21: mol_type = other DNA
  misc_feature 1..21: note = n-mer motif encoding polynucleotide
ctactatctaaaggggactcc

SEQ ID NO: 6293 - DNA, 21 bp, synthetic construct
  misc_feature 1..21: note = n-mer motif encoding polynucleotide
  source 1..21: mol_type = other DNA
tcgagtattagtctgcggtat

SEQ ID NO: 6294 - DNA, 21 bp, synthetic construct
  source 1..21: mol_type = other DNA
  misc_feature 1..21: note = n-mer motif encoding polynucleotide
gggtcgagccaacaccacgaa

SEQ ID NO: 6295 - DNA, 21 bp, synthetic construct
  source 1..21: mol_type = other DNA
  misc_feature 1..21: note = n-mer motif encoding polynucleotide
tcgattgggtattcgcctccg

SEQ ID NO: 6296 - DNA, 21 bp, synthetic construct
  source 1..21: mol_type = other DNA
  misc_feature 1..21: note = n-mer motif encoding polynucleotide
cactccaacgcgactacgata

SEQ ID NO: 6297 - DNA, 21 bp, synthetic construct
  misc_feature 1..21: note = n-mer motif encoding polynucleotide
  source 1..21: mol_type = other DNA
tcggcacacgacgcaagacta

SEQ ID NO: 6298 - DNA, 21 bp, synthetic construct
  misc_feature 1..21: note = n-mer motif encoding polynucleotide
  source 1..21: mol_type = other DNA
gttcacaccgcagacacaata

SEQ ID NO: 6299 - DNA, 21 bp, synthetic construct
  misc_feature 1..21: note = n-mer motif encoding polynucleotide
  source 1..21: mol_type = other DNA
cgagacggctctactaaagtt

SEQ ID NO: 6300 - DNA, 21 bp, synthetic construct
  misc_feature 1..21: note = n-mer motif encoding polynucleotide
  source 1..21: mol_type = other DNA
ttgcaggagtctcttcctggt

SEQ ID NO: 6301 - DNA, 21 bp, synthetic construct
  misc_feature 1..21: note = n-mer motif encoding polynucleotide
  source 1..21: mol_type = other DNA
ttagactacacccctcaaaac

SEQ ID NO: 6302 - DNA, 21 bp, synthetic construct
  misc_feature 1..21: note = n-mer motif encoding polynucleotide
  source 1..21: mol_type = other DNA
ggaccaagttcgcacatcgtt

SEQ ID NO: 6303 - DNA, 21 bp, synthetic construct
  source 1..21: mol_type = other DNA
  misc_feature 1..21: note = n-mer motif encoding polynucleotide
agcgccgacacccggtccccc

SEQ ID NO: 6304 - DNA, 21 bp, synthetic construct
  source 1..21: mol_type = other DNA
  misc_feature 1..21: note = n-mer motif encoding polynucleotide
atgatgaagagtgaggagaat

SEQ ID NO: 6305 - DNA, 21 bp, synthetic construct
  source 1..21: mol_type = other DNA
  misc_feature 1..21: note = n-mer motif encoding polynucleotide
ggtatgacgagtgagttgacg

SEQ ID NO: 6306 - DNA, 21 bp, synthetic construct
  source 1..21: mol_type = other DNA
  misc_feature 1..21: note = n-mer motif encoding polynucleotide
gtagacacctacagcggtctg

SEQ ID NO: 6307 - DNA, 21 bp, synthetic construct
  source 1..21: mol_type = other DNA
  misc_feature 1..21: note = n-mer motif encoding polynucleotide
gggatgagggatacgccgccg

SEQ ID NO: 6308 - DNA, 21 bp, synthetic construct
  misc_feature 1..21: note = n-mer motif encoding polynucleotide
  source 1..21: mol_type = other DNA
gagcatgatgtgagtacgcgt

SEQ ID NO: 6309 - DNA, 21 bp, synthetic construct
  misc_feature 1..21: note = n-mer motif encoding polynucleotide
  source 1..21: mol_type = other DNA
gaggtggtgaagactactcat

SEQ ID NO: 6310 - DNA, 21 bp, synthetic construct
  misc_feature 1..21: note = n-mer motif encoding polynucleotide
  source 1..21: mol_type = other DNA
gtttacgacaacgtttcttct

SEQ ID NO: 6311 - DNA, 21 bp, synthetic construct
  misc_feature 1..21: note = n-mer motif encoding polynucleotide
  source 1..21: mol_type = other DNA
ctcatgaaagacatggaatcc

SEQ ID NO: 6312 - DNA, 21 bp, synthetic construct
  misc_feature 1..21: note = n-mer motif encoding polynucleotide
  source 1..21: mol_type = other DNA
cctcttcatgttgcttctcct

SEQ ID NO: 6313 - DNA, 21 bp, synthetic construct
  misc_feature 1..21: note = n-mer motif encoding polynucleotide
  source 1..21: mol_type = other DNA
gaagtacgcgaccaaaaaaca

SEQ ID NO: 6314 - DNA, 21 bp, synthetic construct
  misc_feature 1..21: note = n-mer motif encoding polynucleotide
  source 1..21: mol_type = other DNA
ccaactccctactacaccgcc

SEQ ID NO: 6315 - DNA, 21 bp, synthetic construct
  misc_feature 1..21: note = n-mer motif encoding polynucleotide
  source 1..21: mol_type = other DNA
aacaactacgcctactccgct

SEQ ID NO: 6316 - DNA, 21 bp, synthetic construct
  source 1..21: mol_type = other DNA
  misc_feature 1..21: note = n-mer motif encoding polynucleotide
cttgttgatacggataggaat

SEQ ID NO: 6317 - DNA, 21 bp, synthetic construct
  source 1..21: mol_type = other DNA
  misc_feature 1..21: note = n-mer motif encoding polynucleotide
tatccggctgatcatcggact

SEQ ID NO: 6318 - DNA, 21 bp, synthetic construct
  misc_feature 1..21: note = n-mer motif encoding polynucleotide
  source 1..21: mol_type = other DNA
tctgcaacaacgaaccacgga

SEQ ID NO: 6319 - DNA, 21 bp, synthetic construct
  misc_feature 1..21: note = n-mer motif encoding polynucleotide
  source 1..21: mol_type = other DNA
cgtgatgatcagcagcttgat

SEQ ID NO: 6320 - DNA, 21 bp, synthetic construct
  source 1..21: mol_type = other DNA
  misc_feature 1..21: note = n-mer motif encoding polynucleotide
ggagcgggacaatctcacgtg

SEQ ID NO: 6321 - DNA, 21 bp, synthetic construct
  misc_feature 1..21: note = n-mer motif encoding polynucleotide
  source 1..21: mol_type = other DNA
gataggacttatcatgaggtg

SEQ ID NO: 6322 - DNA, 21 bp, synthetic construct
  misc_feature 1..21: note = n-mer motif encoding polynucleotide
  source 1..21: mol_type = other DNA
gatggtaataatacgacttat

SEQ ID NO: 6323 - DNA, 21 bp, synthetic construct
  source 1..21: mol_type = other DNA
  misc_feature 1..21: note = n-mer motif encoding polynucleotide
gtgcatatggagtcgtatgcg

SEQ ID NO: 6324 - DNA, 21 bp, synthetic construct
  source 1..21: mol_type = other DNA
  misc_feature 1..21: note = n-mer motif encoding polynucleotide
tggtacgaaacaatcagcccg

SEQ ID NO: 6325 - DNA, 21 bp, synthetic construct
  misc_feature 1..21: note = n-mer motif encoding polynucleotide
  source 1..21: mol_type = other DNA
ctgttgggggctcatcagccg

SEQ ID NO: 6326 - DNA, 21 bp, synthetic construct
  source 1..21: mol_type = other DNA
  misc_feature 1..21: note = n-mer motif encoding polynucleotide
cacgtacctaacactgaagca

SEQ ID NO: 6327 - DNA, 21 bp, synthetic construct
  source 1..21: mol_type = other DNA
  misc_feature 1..21: note = n-mer motif encoding polynucleotide
aattctcagaatcctcagggt

SEQ ID NO: 6328 - DNA, 21 bp, synthetic construct
  source 1..21: mol_type = other DNA
  misc_feature 1..21: note = n-mer motif encoding polynucleotide
ctacaagaccgggcaacgaac

SEQ ID NO: 6329 - DNA, 21 bp, synthetic construct
  source 1..21: mol_type = other DNA
  misc_feature 1..21: note = n-mer motif encoding polynucleotide
attgtgaatcagcattcggag

SEQ ID NO: 6330 - DNA, 21 bp, synthetic construct
  source 1..21: mol_type = other DNA
  misc_feature 1..21: note = n-mer motif encoding polynucleotide
tttgagcagggtaaggttgag

SEQ ID NO: 6331 - DNA, 21 bp, synthetic construct
  misc_feature 1..21: note = n-mer motif encoding polynucleotide
  source 1..21: mol_type = other DNA
gtggcgacgggtgtgtttgct

SEQ ID NO: 6332 - DNA, 21 bp, synthetic construct
  misc_feature 1..21: note = n-mer motif encoding polynucleotide
  source 1..21: mol_type = other DNA
gacaaaatacaaaacgaaaca

SEQ ID NO: 6333 - DNA, 21 bp, synthetic construct
  source 1..21: mol_type = other DNA
  misc_feature 1..21: note = n-mer motif encoding polynucleotide
acggacaacccgtcctacaaa

SEQ ID NO: 6334 - DNA, 21 bp, synthetic construct
  source 1..21: mol_type = other DNA
  misc_feature 1..21: note = n-mer motif encoding polynucleotide
ggcgtgaacacaaaaatcgaa

SEQ ID NO: 6335 - DNA, 21 bp, synthetic construct
  misc_feature 1..21: note = n-mer motif encoding polynucleotide
  source 1..21: mol_type = other DNA
ggctctcacaacggcccagcc

SEQ ID NO: 6336 - DNA, 21 bp, synthetic construct
  misc_feature 1..21: note = n-mer motif encoding polynucleotide
  source 1..21: mol_type = other DNA
tccaacatgggcgtagcctct

SEQ ID NO: 6337 - DNA, 21 bp, synthetic construct
  misc_feature 1..21: note = n-mer motif encoding polynucleotide
  source 1..21: mol_type = other DNA
aacacggacactaacgaaaaa

SEQ ID NO: 6338 - DNA, 21 bp, synthetic construct
  source 1..21: mol_type = other DNA
  misc_feature 1..21: note = n-mer motif encoding polynucleotide
tctgcgcttttgcggatggat

SEQ ID NO: 6339 - DNA, 21 bp, synthetic construct
  source 1..21: mol_type = other DNA
  misc_feature 1..21: note = n-mer motif encoding polynucleotide
cctcaactaagcggcacagcg

SEQ ID NO: 6340 - DNA, 21 bp, synthetic construct
  misc_feature 1..21: note = n-mer motif encoding polynucleotide
  source 1..21: mol_type = other DNA
tctattgttaataatggggct

SEQ ID NO: 6341 - DNA, 21 bp, synthetic construct
  source 1..21: mol_type = other DNA
  misc_feature 1..21: note = n-mer motif encoding polynucleotide
agcctagaccacgcccctcta

SEQ ID NO: 6342 - DNA, 21 bp, synthetic construct
  source 1..21: mol_type = other DNA
  misc_feature 1..21: note = n-mer motif encoding polynucleotide
gaccactcgaaacaaaactct

SEQ ID NO: 6343 - DNA, 21 bp, synthetic construct
  source 1..21: mol_type = other DNA
  misc_feature 1..21: note = n-mer motif encoding polynucleotide
cacagtgacatggtcagcggc

SEQ ID NO: 6344 - DNA, 21 bp, synthetic construct
  source 1..21: mol_type = other DNA
  misc_feature 1..21: note = n-mer motif encoding polynucleotide
cagcatcgtgcgcaggatgtg

SEQ ID NO: 6345 - DNA, 21 bp, synthetic construct
  source 1..21: mol_type = other DNA
  misc_feature 1..21: note = n-mer motif encoding polynucleotide
ggtagtactaagtctgggcag

SEQ ID NO: 6346 - DNA, 21 bp, synthetic construct
  misc_feature 1..21: note = n-mer motif encoding polynucleotide
  source 1..21: mol_type = other DNA
acaatgagcgtaactctggaa

SEQ ID NO: 6347 - DNA, 21 bp, synthetic construct
  source 1..21: mol_type = other DNA
  misc_feature 1..21: note = n-mer motif encoding polynucleotide
tataataatggtgggcatgtt

SEQ ID NO: 6348 - DNA, 21 bp, synthetic construct
  source 1..21: mol_type = other DNA
  misc_feature 1..21: note = n-mer motif encoding polynucleotide
ggtactgctgagaatacgagt

SEQ ID NO: 6349 - DNA, 21 bp, synthetic construct
  misc_feature 1..21: note = n-mer motif encoding polynucleotide
  source 1..21: mol_type = other DNA
aatagttatgatgcgacgagg

SEQ ID NO: 6350 - DNA, 21 bp, synthetic construct
  misc_feature 1..21: note = n-mer motif encoding polynucleotide
  source 1..21: mol_type = other DNA
agcgtcaacaacatgcgactc

SEQ ID NO: 6351 - DNA, 21 bp, synthetic construct
  misc_feature 1..21: note = n-mer motif encoding polynucleotide
  source 1..21: mol_type = other DNA
cttaacttacaatacactctg

SEQ ID NO: 6352 - DNA, 21 bp, synthetic construct
  misc_feature 1..21: note = n-mer motif encoding polynucleotide
  source 1..21: mol_type = other DNA
gaggcgcagaccggctgggtt

SEQ ID NO: 6353 - DNA, 21 bp, synthetic construct
  source 1..21: mol_type = other DNA
  misc_feature 1..21: note = n-mer motif encoding polynucleotide
cccgctgaaggaaacaaccgt

SEQ ID NO: 6354 - DNA, 21 bp, synthetic construct
  misc_feature 1..21: note = n-mer motif encoding polynucleotide
  source 1..21: mol_type = other DNA
tctctgggtgggaatccgcct

SEQ ID NO: 6355 - DNA, 21 bp, synthetic construct
  misc_feature 1..21: note = n-mer motif encoding polynucleotide
  source 1..21: mol_type = other DNA
tataatagggataatggttct

SEQ ID NO: 6356 - DNA, 21 bp, synthetic construct
  source 1..21: mol_type = other DNA
  misc_feature 1..21: note = n-mer motif encoding polynucleotide
ttgactgatcctaaggggcag

SEQ ID NO: 6357 - DNA, 21 bp, synthetic construct
  misc_feature 1..21: note = n-mer motif encoding polynucleotide
  source 1..21: mol_type = other DNA
accccaacaggcaccaacaaa

SEQ ID NO: 6358 - DNA, 21 bp, synthetic construct
  source 1..21: mol_type = other DNA
  misc_feature 1..21: note = n-mer motif encoding polynucleotide
gttcacgctaacgctacatta

SEQ ID NO: 6359 - DNA, 21 bp, synthetic construct
  misc_feature 1..21: note = n-mer motif encoding polynucleotide
  source 1..21: mol_type = other DNA
cgcgaaatagtgcactcaaac

SEQ ID NO: 6360 - DNA, 21 bp, synthetic construct
  misc_feature 1..21: note = n-mer motif encoding polynucleotide
  source 1..21: mol_type = other DNA
tacgccgtcgcgataggcaca

SEQ ID NO: 6361 - DNA, 21 bp, synthetic construct
  source 1..21: mol_type = other DNA
  misc_feature 1..21: note = n-mer motif encoding polynucleotide
aacacaacacctcccgaccac

SEQ ID NO: 6362 - DNA, 21 bp, synthetic construct
  misc_feature 1..21: note = n-mer motif encoding polynucleotide
  source 1..21: mol_type = other DNA
gttattcagtctgataatacg

SEQ ID NO: 6363 - DNA, 21 bp, synthetic construct
  source 1..21: mol_type = other DNA
  misc_feature 1..21: note = n-mer motif encoding polynucleotide
gttccggcgcattctcggggt

SEQ ID NO: 6364 - DNA, 21 bp, synthetic construct
  source 1..21: mol_type = other DNA
  misc_feature 1..21: note = n-mer motif encoding polynucleotide
caaaacagtgacctcgccagc

SEQ ID NO: 6365 - DNA, 21 bp, synthetic construct
  misc_feature 1..21: note = n-mer motif encoding polynucleotide
  source 1..21: mol_type = other DNA
cgcatcgtagacacgttggga

SEQ ID NO: 6366 - DNA, 21 bp, synthetic construct
  misc_feature 1..21: note = n-mer motif encoding polynucleotide
  source 1..21: mol_type = other DNA
cacacttactcacaagcagac

SEQ ID NO: 6367 - DNA, 21 bp, synthetic construct
  source 1..21: mol_type = other DNA
  misc_feature 1..21: note = n-mer motif encoding polynucleotide
acggctccatccgtagggtct

SEQ ID NO: 6368 - DNA, 21 bp, synthetic construct
  source 1..21: mol_type = other DNA
  misc_feature 1..21: note = n-mer motif encoding polynucleotide
aacgtgggcaccgacagagac

SEQ ID NO: 6369 - DNA, 21 bp, synthetic construct
  misc_feature 1..21: note = n-mer motif encoding polynucleotide
  source 1..21: mol_type = other DNA
gggattaatcgtactagtgag

SEQ ID NO: 6370 - DNA, 21 bp, synthetic construct
  misc_feature 1..21: note = n-mer motif encoding polynucleotide
  source 1..21: mol_type = other DNA
gtagaaacagacagcttaata

SEQ ID NO: 6371 - DNA, 21 bp, synthetic construct
  source 1..21: mol_type = other DNA
  misc_feature 1..21: note = n-mer motif encoding polynucleotide
cactccgcagcgggtgacggt

SEQ ID NO: 6372 - DNA, 21 bp, synthetic construct
  misc_feature 1..21: note = n-mer motif encoding polynucleotide
  source 1..21: mol_type = other DNA
gatgctgggattagttcttat

SEQ ID NO: 6373 - DNA, 21 bp, synthetic construct
  source 1..21: mol_type = other DNA
  misc_feature 1..21: note = n-mer motif encoding polynucleotide
tgcaccgccacaaaatgctca

SEQ ID NO: 6374 - DNA, 21 bp, synthetic construct
  misc_feature 1..21: note = n-mer motif encoding polynucleotide
  source 1..21: mol_type = other DNA
cgcatagacactctcctagtc

SEQ ID NO: 6375 - DNA, 21 bp, synthetic construct
  source 1..21: mol_type = other DNA
  misc_feature 1..21: note = n-mer motif encoding polynucleotide
gtatcacaatcacacgacgtg

SEQ ID NO: 6376 - DNA, 21 bp, synthetic construct
  misc_feature 1..21: note = n-mer motif encoding polynucleotide
  source 1..21: mol_type = other DNA
gcactaccatcccactcctcc

SEQ ID NO: 6377 - DNA, 21 bp, synthetic construct
  source 1..21: mol_type = other DNA
  misc_feature 1..21: note = n-mer motif encoding polynucleotide
gggaaacctgcggaagcgccg

SEQ ID NO: 6378 - DNA, 21 bp, synthetic construct
  source 1..21: mol_type = other DNA
  misc_feature 1..21: note = n-mer motif encoding polynucleotide
tggaatagtccgggtgaggcg

SEQ ID NO: 6379 - DNA, 21 bp, synthetic construct
  misc_feature 1..21: note = n-mer motif encoding polynucleotide
  source 1..21: mol_type = other DNA
aggctggagcgtccggattat

SEQ ID NO: 6380 - DNA, 21 bp, synthetic construct
  source 1..21: mol_type = other DNA
  misc_feature 1..21: note = n-mer motif encoding polynucleotide
acgcgggagagtctggtggat

SEQ ID NO: 6381 - DNA, 21 bp, synthetic construct
  source 1..21: mol_type = other DNA
  misc_feature 1..21: note = n-mer motif encoding polynucleotide
agacacgaaggtccgtactcc

SEQ ID NO: 6382 - DNA, 21 bp, synthetic construct
  source 1..21: mol_type = other DNA
  misc_feature 1..21: note = n-mer motif encoding polynucleotide
gttttgtctgataaggcgttt

SEQ ID NO: 6383 - DNA, 21 bp, synthetic construct
  misc_feature 1..21: note = n-mer motif encoding polynucleotide
  source 1..21: mol_type = other DNA
actagtgcgactgattcgatg

SEQ ID NO: 6384 - DNA, 21 bp, synthetic construct
  misc_feature 1..21: note = n-mer motif encoding polynucleotide
  source 1..21: mol_type = other DNA
actgagccgcttccgatgtct

SEQ ID NO: 6385 - DNA, 21 bp, synthetic construct
  misc_feature 1..21: note = n-mer motif encoding polynucleotide
  source 1..21: mol_type = other DNA
atgccttacgtcgggacagta

SEQ ID NO: 6386 - DNA, 21 bp, synthetic construct
  misc_feature 1..21: note = n-mer motif encoding polynucleotide
  source 1..21: mol_type = other DNA
cgtgattattctcctactgat

SEQ ID NO: 6387 - DNA, 21 bp, synthetic construct
  misc_feature 1..21: note = n-mer motif encoding polynucleotide
  source 1..21: mol_type = other DNA
cggaatggtggtactacggat

SEQ ID NO: 6388 - DNA, 21 bp, synthetic construct
  source 1..21: mol_type = other DNA
  misc_feature 1..21: note = n-mer motif encoding polynucleotide
atgatgggcgcgacaacgaaa

SEQ ID NO: 6389 - DNA, 21 bp, synthetic construct
  misc_feature 1..21: note = n-mer motif encoding polynucleotide
  source 1..21: mol_type = other DNA
gctgccgttggcggagacacc

SEQ ID NO: 6390 - DNA, 21 bp, synthetic construct
  misc_feature 1..21: note = n-mer motif encoding polynucleotide
  source 1..21: mol_type = other DNA
cttgtgaataatgatgggact

SEQ ID NO: 6391 - DNA, 21 bp, synthetic construct
  source 1..21: mol_type = other DNA
  misc_feature 1..21: note = n-mer motif encoding polynucleotide
agttcgactccgcaggatact

SEQ ID NO: 6392 - DNA, 21 bp, synthetic construct
  misc_feature 1..21: note = n-mer motif encoding polynucleotide
  source 1..21: mol_type = other DNA
agtctgcggatggagaatagt

SEQ ID NO: 6393 - DNA, 21 bp, synthetic construct
  source 1..21: mol_type = other DNA
  misc_feature 1..21: note = n-mer motif encoding polynucleotide
gtgcaggggcagaccggctgg

SEQ ID NO: 6394 - DNA, 21 bp, synthetic construct
  source 1..21: mol_type = other DNA
  misc_feature 1..21: note = n-mer motif encoding polynucleotide
ctaggtttcacaccccaaccg

SEQ ID NO: 6395 - DNA, 21 bp, synthetic construct
  misc_feature 1..21: note = n-mer motif encoding polynucleotide
  source 1..21: mol_type = other DNA
tcggttgctaaggatcagacg

SEQ ID NO: 6396 - DNA, 21 bp, synthetic construct
  source 1..21: mol_type = other DNA
  misc_feature 1..21: note = n-mer motif encoding polynucleotide
ccgcggcatgagttgagtaat

SEQ ID NO: 6397 - DNA, 21 bp, synthetic construct
  source 1..21: mol_type = other DNA
  misc_feature 1..21: note = n-mer motif encoding polynucleotide
aaaatgggatcgaaccccgca

SEQ ID NO: 6398 - DNA, 21 bp, synthetic construct
  source 1..21: mol_type = other DNA
  misc_feature 1..21: note = n-mer motif encoding polynucleotide
gaggcgactcatggttcttat

SEQ ID NO: 6399 - DNA, 21 bp, synthetic construct
  misc_feature 1..21: note = n-mer motif encoding polynucleotide
  source 1..21: mol_type = other DNA
cctgaggttgcgtgtcctggg

SEQ ID NO: 6400 - DNA, 21 bp, synthetic construct
  source 1..21: mol_type = other DNA
  misc_feature 1..21: note = n-mer motif encoding polynucleotide
gtgaatacgcgggaggttacg

SEQ ID NO: 6401 - DNA, 21 bp, synthetic construct
  source 1..21: mol_type = other DNA
  misc_feature 1..21: note = n-mer motif encoding polynucleotide
acggctcgtgcgattgatatg

SEQ ID NO: 6402 - DNA, 21 bp, synthetic construct
  source 1..21: mol_type = other DNA
  misc_feature 1..21: note = n-mer motif encoding polynucleotide
accgacggcgccctgggttac

SEQ ID NO: 6403 - DNA, 21 bp, synthetic construct
  misc_feature 1..21: note = n-mer motif encoding polynucleotide
  source 1..21: mol_type = other DNA
gggtcgcaatacgcgaaccgc

SEQ ID NO: 6404 - DNA, 21 bp, synthetic construct
  misc_feature 1..21: note = n-mer motif encoding polynucleotide
  source 1..21: mol_type = other DNA
gaaatgggtaaccaataccca

SEQ ID NO: 6405 - DNA, 21 bp, synthetic construct
  source 1..21: mol_type = other DNA
  misc_feature 1..21: note = n-mer motif encoding polynucleotide
ccgtcgacactcgctgaaaca

SEQ ID NO: 6406 - DNA, 21 bp, synthetic construct
  source 1..21: mol_type = other DNA
  misc_feature 1..21: note = n-mer motif encoding polynucleotide
cgcataggcgttggagcacca

SEQ ID NO: 6407 - DNA, 21 bp, synthetic construct
  source 1..21: mol_type = other DNA
  misc_feature 1..21: note = n-mer motif encoding polynucleotide
ctgagtgtgaaggaggagatt

SEQ ID NO: 6408 - DNA, 21 bp, synthetic construct
  source 1..21: mol_type = other DNA
  misc_feature 1..21: note = n-mer motif encoding polynucleotide
tatactactcatgagagtggg

SEQ ID NO: 6409 - DNA, 21 bp, synthetic construct
  misc_feature 1..21: note = n-mer motif encoding polynucleotide
  source 1..21: mol_type = other DNA
cttactgctgttctgactgtt

SEQ ID NO: 6410 - DNA, 21 bp, synthetic construct
  misc_feature 1..21: note = n-mer motif encoding polynucleotide
  source 1..21: mol_type = other DNA
ctgcagacttctgttgctact

SEQ ID NO: 6411 - DNA, 21 bp, synthetic construct
  source 1..21: mol_type = other DNA
  misc_feature 1..21: note = n-mer motif encoding polynucleotide
actgtgcgttcgcctcagccg

SEQ ID NO: 6412 - DNA, 21 bp, synthetic construct
  misc_feature 1..21: note = n-mer motif encoding polynucleotide
  source 1..21: mol_type = other DNA
catcctgatggtactcggccg

SEQ ID NO: 6413 - DNA, 21 bp, synthetic construct
  misc_feature 1..21: note = n-mer motif encoding polynucleotide
  source 1..21: mol_type = other DNA
ggagtaacaatcggtagcagg

SEQ ID NO: 6414 - DNA, 21 bp, synthetic construct
  source 1..21: mol_type = other DNA
  misc_feature 1..21: note = n-mer motif encoding polynucleotide
acatacgcctctactgaagcg

SEQ ID NO: 6415 - DNA, 21 bp, synthetic construct
  source 1..21: mol_type = other DNA
  misc_feature 1..21: note = n-mer motif encoding polynucleotide
aggagtagtcctgcgacgaat

SEQ ID NO: 6416 - DNA, 21 bp, synthetic construct
  source 1..21: mol_type = other DNA
  misc_feature 1..21: note = n-mer motif encoding polynucleotide
atcgggtcgccgttggccaac

SEQ ID NO: 6417 - DNA, 21 bp, synthetic construct
  misc_feature 1..21: note = n-mer motif encoding polynucleotide
  source 1..21: mol_type = other DNA
gcgtcgactgagtctcatgtg

SEQ ID NO: 6418 - DNA, 21 bp, synthetic construct
  source 1..21: mol_type = other DNA
  misc_feature 1..21: note = n-mer motif encoding polynucleotide
attgcgcagaatgagacgtat

SEQ ID NO: 6419 - DNA, 21 bp, synthetic construct
  source 1..21: mol_type = other DNA
  misc_feature 1..21: note = n-mer motif encoding polynucleotide
atggagtctaagccgtggcag

SEQ ID NO: 6420 - DNA, 21 bp, synthetic construct
  source 1..21: mol_type = other DNA
  misc_feature 1..21: note = n-mer motif encoding polynucleotide
ttagaaaacccaacaccagca

SEQ ID NO: 6421 - DNA, 21 bp, synthetic construct
  source 1..21: mol_type = other DNA
  misc_feature 1..21: note = n-mer motif encoding polynucleotide
cccaaccccagtccaagacaa

SEQ ID NO: 6422 - DNA, 21 bp, synthetic construct
  source 1..21: mol_type = other DNA
  misc_feature 1..21: note = n-mer motif encoding polynucleotide
tcgactagtaatccgccttat

SEQ ID NO: 6423 - DNA, 21 bp, synthetic construct
  misc_feature 1..21: note = n-mer motif encoding polynucleotide
  source 1..21: mol_type = other DNA
tatttgacggatactcctact

SEQ ID NO: 6424 - DNA, 21 bp, synthetic construct
  misc_feature 1..21: note = n-mer motif encoding polynucleotide
  source 1..21: mol_type = other DNA
atacgtgcattgatgacggac

SEQ ID NO: 6425 - DNA, 21 bp, synthetic construct
  misc_feature 1..21: note = n-mer motif encoding polynucleotide
  source 1..21: mol_type = other DNA
cctatgggtacggatacggtt

SEQ ID NO: 6426 - DNA, 21 bp, synthetic construct
  misc_feature 1..21: note = n-mer motif encoding polynucleotide
  source 1..21: mol_type = other DNA
acgaggactcaggggacgtct

SEQ ID NO: 6427 - DNA, 21 bp, synthetic construct
  misc_feature 1..21: note = n-mer motif encoding polynucleotide
  source 1..21: mol_type = other DNA
tctaataatatgaatcaggcg

SEQ ID NO: 6428 - DNA, 21 bp, synthetic construct
  misc_feature 1..21: note = n-mer motif encoding polynucleotide
  source 1..21: mol_type = other DNA
gaagactctgtaaaccacatc

SEQ ID NO: 6429 - DNA, 21 bp, synthetic construct
  source 1..21: mol_type = other DNA
  misc_feature 1..21: note = n-mer motif encoding polynucleotide
tctgttgtgcctacggataag

SEQ ID NO: 6430 - DNA, 21 bp, synthetic construct
  source 1..21: mol_type = other DNA
  misc_feature 1..21: note = n-mer motif encoding polynucleotide
gtgcgcggcgttcaagacgcc

SEQ ID NO: 6431 - DNA, 21 bp, synthetic construct
  misc_feature 1..21: note = n-mer motif encoding polynucleotide
  source 1..21: mol_type = other DNA
catgatgtgactgtgcggaat

SEQ ID NO: 6432 - DNA, 21 bp, synthetic construct
  source 1..21: mol_type = other DNA
  misc_feature 1..21: note = n-mer motif encoding polynucleotide
cataataatcatgcgggtgag

SEQ ID NO: 6433 - DNA, 21 bp, synthetic construct
  source 1..21: mol_type = other DNA
  misc_feature 1..21: note = n-mer motif encoding polynucleotide
ggtaatatgaatcatagtatt

SEQ ID NO: 6434 - DNA, 21 bp, synthetic construct
  misc_feature 1..21: note = n-mer motif encoding polynucleotide
  source 1..21: mol_type = other DNA
ggtgtgcatactcatactgtt

SEQ ID NO: 6435 - DNA, 21 bp, synthetic construct
  misc_feature 1..21: note = n-mer motif encoding polynucleotide
  source 1..21: mol_type = other DNA
tttttgccgcagctggggcag

SEQ ID NO: 6436 - DNA, 21 bp, synthetic construct
  source 1..21: mol_type = other DNA
  misc_feature 1..21: note = n-mer motif encoding polynucleotide
ttggccaacatgtccgcacca

SEQ ID NO: 6437 - DNA, 21 bp, synthetic construct
  misc_feature 1..21: note = n-mer motif encoding polynucleotide
  source 1..21: mol_type = other DNA
gttcgcagagacgaaacacct

SEQ ID NO: 6438 - DNA, 21 bp, synthetic construct
  misc_feature 1..21: note = n-mer motif encoding polynucleotide
  source 1..21: mol_type = other DNA
tgccgcgacaacgtcttagct

SEQ ID NO: 6439 - DNA, 21 bp, synthetic construct
  source 1..21: mol_type = other DNA
  misc_feature 1..21: note = n-mer motif encoding polynucleotide
atgttggcttctcgggtgcct

SEQ ID NO: 6440 - DNA, 21 bp, synthetic construct
  misc_feature 1..21: note = n-mer motif encoding polynucleotide
  source 1..21: mol_type = other DNA
gtcagaacagtccttcaacaa

SEQ ID NO: 6441 - DNA, 21 bp, synthetic construct
  misc_feature 1..21: note = n-mer motif encoding polynucleotide
  source 1..21: mol_type = other DNA
tcgaatcagaatgtggattgg

SEQ ID NO: 6442 - DNA, 21 bp, synthetic construct
  source 1..21: mol_type = other DNA
  misc_feature 1..21: note = n-mer motif encoding polynucleotide
actgaggttacgggggatagt

SEQ ID NO: 6443 - DNA, 21 bp, synthetic construct
  source 1..21: mol_type = other DNA
  misc_feature 1..21: note = n-mer motif encoding polynucleotide
gaaagtgccacatctctaaaa

SEQ ID NO: 6444 - DNA, 21 bp, synthetic construct
  misc_feature 1..21: note = n-mer motif encoding polynucleotide
  source 1..21: mol_type = other DNA
aaccaccccgcaccaagctca

SEQ ID NO: 6445 - DNA, 21 bp, synthetic construct
  source 1..21: mol_type = other DNA
  misc_feature 1..21: note = n-mer motif encoding polynucleotide
tacggtaacgcgaacaccgta

SEQ ID NO: 6446 - DNA, 21 bp, synthetic construct
  misc_feature 1..21: note = n-mer motif encoding polynucleotide
  source 1..21: mol_type = other DNA
caaaacgacaaatctgacaac

SEQ ID NO: 6447 - DNA, 21 bp, synthetic construct
  source 1..21: mol_type = other DNA
  misc_feature 1..21: note = n-mer motif encoding polynucleotide
agtcaggctcagattcgtgtt

SEQ ID NO: 6448 - DNA, 21 bp, synthetic construct
  source 1..21: mol_type = other DNA
  misc_feature 1..21: note = n-mer motif encoding polynucleotide
tttcagcgtgatgttggtcat

SEQ ID NO: 6449 - DNA, 21 bp, synthetic construct
  misc_feature 1..21: note = n-mer motif encoding polynucleotide
  source 1..21: mol_type = other DNA
ctgatgaatcgtaatgctcct

SEQ ID NO: 6450 - DNA, 21 bp, synthetic construct
  misc_feature 1..21: note = n-mer motif encoding polynucleotide
  source 1..21: mol_type = other DNA
gcgggcagttcgccatcacgc

SEQ ID NO: 6451 - DNA, 21 bp, synthetic construct
  source 1..21: mol_type = other DNA
  misc_feature 1..21: note = n-mer motif encoding polynucleotide
ttattccacagccaaatgacc

SEQ ID NO: 6452 - DNA, 21 bp, synthetic construct
  misc_feature 1..21: note = n-mer motif encoding polynucleotide
  source 1..21: mol_type = other DNA
atgatgtctaacagcctcgcg

SEQ ID NO: 6453 - DNA, 21 bp, synthetic construct
  source 1..21: mol_type = other DNA
  misc_feature 1..21: note = n-mer motif encoding polynucleotide
gttaccaccgtcctccaatca

SEQ ID NO: 6454 - DNA, 21 bp, synthetic construct
  source 1..21: mol_type = other DNA
  misc_feature 1..21: note = n-mer motif encoding polynucleotide
ggtagtcagcgtgctatgaat

SEQ ID NO: 6455 - DNA, 21 bp, synthetic construct
  source 1..21: mol_type = other DNA
  misc_feature 1..21: note = n-mer motif encoding polynucleotide
gcatccggcgcacgctacgtc

SEQ ID NO: 6456 - DNA, 21 bp, synthetic construct
  source 1..21: mol_type = other DNA
  misc_feature 1..21: note = n-mer motif encoding polynucleotide
aaaaactacgacagtgactca

SEQ ID NO: 6457 - DNA, 21 bp, synthetic construct
  misc_feature 1..21: note = n-mer motif encoding polynucleotide
  source 1..21: mol_type = other DNA
gtgggttctggggttggggtt

SEQ ID NO: 6458 - DNA, 21 bp, synthetic construct
  misc_feature 1..21: note = n-mer motif encoding polynucleotide
  source 1..21: mol_type = other DNA
cgttctgaccttactgaaagt

SEQ ID NO: 6459 - DNA, 21 bp, synthetic construct
  misc_feature 1..21: note = n-mer motif encoding polynucleotide
  source 1..21: mol_type = other DNA
agggcggagtttattgatacg

SEQ ID NO: 6460 - DNA, 21 bp, synthetic construct
  source 1..21: mol_type = other DNA
  misc_feature 1..21: note = n-mer motif encoding polynucleotide
acatctgaaatgcggacagcc

SEQ ID NO: 6461 - DNA, 21 bp, synthetic construct
  source 1..21: mol_type = other DNA
  misc_feature 1..21: note = n-mer motif encoding polynucleotide
gagttggatcatctttcgcat

SEQ ID NO: 6462 - DNA, 21 bp, synthetic construct
  source 1..21: mol_type = other DNA
  misc_feature 1..21: note = n-mer motif encoding polynucleotide
acacaagcaggtcttgcgtca

SEQ ID NO: 6463 - DNA, 21 bp, synthetic construct
  source 1..21: mol_type = other DNA
  misc_feature 1..21: note = n-mer motif encoding polynucleotide
gcggctcagcatcatgatacg

SEQ ID NO: 6464 - DNA, 21 bp, synthetic construct
  misc_feature 1..21: note = n-mer motif encoding polynucleotide
  source 1..21: mol_type = other DNA
ggcggcgcacacactcgtgta

SEQ ID NO: 6465 - DNA, 21 bp, synthetic construct
  source 1..21: mol_type = other DNA
  misc_feature 1..21: note = n-mer motif encoding polynucleotide
gcctacggtatacacgaagtg

SEQ ID NO: 6466 - DNA, 21 bp, synthetic construct
  misc_feature 1..21: note = n-mer motif encoding polynucleotide
  source 1..21: mol_type = other DNA
gcgatgctgcgtatggagcag

SEQ ID NO: 6467 - DNA, 21 bp, synthetic construct
  source 1..21: mol_type = other DNA
  misc_feature 1..21: note = n-mer motif encoding polynucleotide
acggatcgttcgcggctgggg

SEQ ID NO: 6468 - DNA, 21 bp, synthetic construct
  misc_feature 1..21: note = n-mer motif encoding polynucleotide
  source 1..21: mol_type = other DNA
gagagggagcctcctaagaat

SEQ ID NO: 6469 - DNA, 21 bp, synthetic construct
  misc_feature 1..21: note = n-mer motif encoding polynucleotide
  source 1..21: mol_type = other DNA
gttgttaaggagattaagctg

SEQ ID NO: 6470 - DNA, 21 bp, synthetic construct
  misc_feature 1..21: note = n-mer motif encoding polynucleotide
  source 1..21: mol_type = other DNA
cacaccggccaaacaccatca

SEQ ID NO: 6471 - DNA, 21 bp, synthetic construct
  source 1..21: mol_type = other DNA
  misc_feature 1..21: note = n-mer motif encoding polynucleotide
gtgtctctgagttcgcctccg

SEQ ID NO: 6472 - DNA, 21 bp, synthetic construct
  misc_feature 1..21: note = n-mer motif encoding polynucleotide
  source 1..21: mol_type = other DNA
ggggcaggaaacctgggtacc

SEQ ID NO: 6473 - DNA, 21 bp, synthetic construct
  misc_feature 1..21: note = n-mer motif encoding polynucleotide
  source 1..21: mol_type = other DNA
gcacgagacgacacgatacaa

SEQ ID NO: 6474 - DNA, 21 bp, synthetic construct
  source 1..21: mol_type = other DNA
  misc_feature 1..21: note = n-mer motif encoding polynucleotide
gggacttatactaatatgccg

SEQ ID NO: 6475 - DNA, 21 bp, synthetic construct
  misc_feature 1..21: note = n-mer motif encoding polynucleotide
  source 1..21: mol_type = other DNA
atgctggggggttttgcgcag

SEQ ID NO: 6476 - DNA, 21 bp, synthetic construct
  misc_feature 1..21: note = n-mer motif encoding polynucleotide
  source 1..21: mol_type = other DNA
ccatccgaaatgagggccgta

SEQ ID NO: 6477 - DNA, 21 bp, synthetic construct
  misc_feature 1..21: note = n-mer motif encoding polynucleotide
  source 1..21: mol_type = other DNA
cgtataagcccagaaaactca

SEQ ID NO: 6478 - DNA, 21 bp, synthetic construct
  source 1..21: mol_type = other DNA
  misc_feature 1..21: note = n-mer motif encoding polynucleotide
aagatgggtggttctcagagt

SEQ ID NO: 6479 - DNA, 21 bp, synthetic construct
  misc_feature 1..21: note = n-mer motif encoding polynucleotide
  source 1..21: mol_type = other DNA
ggtttgatggcgcatgtgact

SEQ ID NO: 6480 - DNA, 21 bp, synthetic construct
  source 1..21: mol_type = other DNA
  misc_feature 1..21: note = n-mer motif encoding polynucleotide
tcacgtcaaacagcgctaaca

SEQ ID NO: 6481 - DNA, 21 bp, synthetic construct
  misc_feature 1..21: note = n-mer motif encoding polynucleotide
  source 1..21: mol_type = other DNA
agtgatctgaatcttccgccg

SEQ ID NO: 6482 - DNA, 21 bp, synthetic construct
  misc_feature 1..21: note = n-mer motif encoding polynucleotide
  source 1..21: mol_type = other DNA
tatgtgtctgattatttgcat

SEQ ID NO: 6483 - DNA, 21 bp, synthetic construct
  source 1..21: mol_type = other DNA
  misc_feature 1..21: note = n-mer motif encoding polynucleotide
actaatgataatagtgatcgt

SEQ ID NO: 6484 - DNA, 21 bp, synthetic construct
  misc_feature 1..21: note = n-mer motif encoding polynucleotide
  source 1..21: mol_type = other DNA
tacttaatgcacgacagcgca

SEQ ID NO: 6485 - DNA, 21 bp, synthetic construct
  source 1..21: mol_type = other DNA
  misc_feature 1..21: note = n-mer motif encoding polynucleotide
ggctctcggaacggacccaca

SEQ ID NO: 6486 - DNA, 21 bp, synthetic construct
  source 1..21: mol_type = other DNA
  misc_feature 1..21: note = n-mer motif encoding polynucleotide
aaaaacggtgttataaacgac

SEQ ID NO: 6487 - DNA, 21 bp, synthetic construct
  source 1..21: mol_type = other DNA
  misc_feature 1..21: note = n-mer motif encoding polynucleotide
gagtctgttgctaatcttaag

SEQ ID NO: 6488 - DNA, 21 bp, synthetic construct
  source 1..21: mol_type = other DNA
  misc_feature 1..21: note = n-mer motif encoding polynucleotide
gcatcggactcgacgacacca

SEQ ID NO: 6489 - DNA, 21 bp, synthetic construct
  source 1..21: mol_type = other DNA
  misc_feature 1..21: note = n-mer motif encoding polynucleotide
ctgaacgttagttcatccaaa

SEQ ID NO: 6490 - DNA, 21 bp, synthetic construct
  source 1..21: mol_type = other DNA
  misc_feature 1..21: note = n-mer motif encoding polynucleotide
gaggctaagggttttggtcat

SEQ ID NO: 6491 - DNA, 21 bp, synthetic construct
  source 1..21: mol_type = other DNA
  misc_feature 1..21: note = n-mer motif encoding polynucleotide
ggtacgagtgcggagagtcgg

SEQ ID NO: 6492 - DNA, 21 bp, synthetic construct
  misc_feature 1..21: note = n-mer motif encoding polynucleotide
  source 1..21: mol_type = other DNA
atgcacaacctaccctcatac

SEQ ID NO: 6493 - DNA, 21 bp, synthetic construct
  source 1..21: mol_type = other DNA
  misc_feature 1..21: note = n-mer motif encoding polynucleotide
gtcttcacagaaatagaatcg

SEQ ID NO: 6494 - DNA, 21 bp, synthetic construct
  misc_feature 1..21: note = n-mer motif encoding polynucleotide
  source 1..21: mol_type = other DNA
actcaaacttctacctggacc

SEQ ID NO: 6495 - DNA, 21 bp, synthetic construct
  misc_feature 1..21: note = n-mer motif encoding polynucleotide
  source 1..21: mol_type = other DNA
cctatgaataaggatattttg

SEQ ID NO: 6496 - DNA, 21 bp, synthetic construct
  misc_feature 1..21: note = n-mer motif encoding polynucleotide
  source 1..21: mol_type = other DNA
aaagaatctgaatacagagtt

SEQ ID NO: 6497 - DNA, 21 bp, synthetic construct
  misc_feature 1..21: note = n-mer motif encoding polynucleotide
  source 1..21: mol_type = other DNA
tcgacgaattctgaggcggtt

SEQ ID NO: 6498 - DNA, 21 bp, synthetic construct
  misc_feature 1..21: note = n-mer motif encoding polynucleotide
  source 1..21: mol_type = other DNA
gatacggcgaatcgttcgact

SEQ ID NO: 6499 - DNA, 21 bp, synthetic construct
  source 1..21: mol_type = other DNA
  misc_feature 1..21: note = n-mer motif encoding polynucleotide
cctaaggctccgcttaataat

SEQ ID NO: 6500 - DNA, 21 bp, synthetic construct
  source 1..21: mol_type = other DNA
  misc_feature 1..21: note = n-mer motif encoding polynucleotide
ttagctacatacccctcccac

SEQ ID NO: 6501 - DNA, 21 bp, synthetic construct
  source 1..21: mol_type = other DNA
  misc_feature 1..21: note = n-mer motif encoding polynucleotide
gctacggttcagtcggttgat

SEQ ID NO: 6502 - DNA, 21 bp, synthetic construct
  source 1..21: mol_type = other DNA
  misc_feature 1..21: note = n-mer motif encoding polynucleotide
aattcgatgggtaatgggggt

SEQ ID NO: 6503 - DNA, 21 bp, synthetic construct
  misc_feature 1..21: note = n-mer motif encoding polynucleotide
  source 1..21: mol_type = other DNA
gatcatagtgagcagaattcg

SEQ ID NO: 6504 - DNA, 21 bp, synthetic construct
  misc_feature 1..21: note = n-mer motif encoding polynucleotide
  source 1..21: mol_type = other DNA
acttttttgcctcagcttggg

SEQ ID NO: 6505 - DNA, 21 bp, synthetic construct
  misc_feature 1..21: note = n-mer motif encoding polynucleotide
  source 1..21: mol_type = other DNA
gggtttactaatacgagtaag

SEQ ID NO: 6506 - DNA, 21 bp, synthetic construct
  source 1..21: mol_type = other DNA
  misc_feature 1..21: note = n-mer motif encoding polynucleotide
acgatgaattatagtcatact

SEQ ID NO: 6507 - DNA, 21 bp, synthetic construct
  source 1..21: mol_type = other DNA
  misc_feature 1..21: note = n-mer motif encoding polynucleotide
agtatcggattctcagtaggc

SEQ ID NO: 6508 - DNA, 21 bp, synthetic construct
  misc_feature 1..21: note = n-mer motif encoding polynucleotide
  source 1..21: mol_type = other DNA
agtgagaatcgggctggtaat

SEQ ID NO: 6509 - DNA, 21 bp, synthetic construct
  source 1..21: mol_type = other DNA
  misc_feature 1..21: note = n-mer motif encoding polynucleotide
agtcttaatctgcatagtgtg

SEQ ID NO: 6510 - DNA, 21 bp, synthetic construct
  misc_feature 1..21: note = n-mer motif encoding polynucleotide
  source 1..21: mol_type = other DNA
catgagagtcattatgttagt

SEQ ID NO: 6511 - DNA, 21 bp, synthetic construct
  misc_feature 1..21: note = n-mer motif encoding polynucleotide
  source 1..21: mol_type = other DNA
aatgttgttaatgggatggat

SEQ ID NO: 6512 - DNA, 21 bp, synthetic construct
  source 1..21: mol_type = other DNA
  misc_feature 1..21: note = n-mer motif encoding polynucleotide
cactccgacaaagtctcctca

SEQ ID NO: 6513 - DNA, 21 bp, synthetic construct
  source 1..21: mol_type = other DNA
  misc_feature 1..21: note = n-mer motif encoding polynucleotide
aaatctgtaggcgacgggaga

SEQ ID NO: 6514 - DNA, 21 bp, synthetic construct
  source 1..21: mol_type = other DNA
  misc_feature 1..21: note = n-mer motif encoding polynucleotide
aggcaggttgagcagtctgat

SEQ ID NO: 6515 - DNA, 21 bp, synthetic construct
  source 1..21: mol_type = other DNA
  misc_feature 1..21: note = n-mer motif encoding polynucleotide
agggagctggtgaatacggat

SEQ ID NO: 6516 - DNA, 21 bp, synthetic construct
  source 1..21: mol_type = other DNA
  misc_feature 1..21: note = n-mer motif encoding polynucleotide
aactacagggacatcacaatg

SEQ ID NO: 6517 - DNA, 21 bp, synthetic construct
  source 1..21: mol_type = other DNA
  misc_feature 1..21: note = n-mer motif encoding polynucleotide
gccagccttgaccgccttcca

SEQ ID NO: 6518 - DNA, 21 bp, synthetic construct
  misc_feature 1..21: note = n-mer motif encoding polynucleotide
  source 1..21: mol_type = other DNA
agacaacttgcttctctccca

SEQ ID NO: 6519 - DNA, 21 bp, synthetic construct
  source 1..21: mol_type = other DNA
  misc_feature 1..21: note = n-mer motif encoding polynucleotide
gtcagcaaaaccaaagactcg

SEQ ID NO: 6520 - DNA, 21 bp, synthetic construct
  source 1..21: mol_type = other DNA
  misc_feature 1..21: note = n-mer motif encoding polynucleotide
aacgtatacgaagggcaccgc

SEQ ID NO: 6521 - DNA, 21 bp, synthetic construct
  misc_feature 1..21: note = n-mer motif encoding polynucleotide
  source 1..21: mol_type = other DNA
ctagaacaactacgggtccca

SEQ ID NO: 6522 - DNA, 21 bp, synthetic construct
  misc_feature 1..21: note = n-mer motif encoding polynucleotide
  source 1..21: mol_type = other DNA
atgacctacacatccccaacc

SEQ ID NO: 6523 - DNA, 21 bp, synthetic construct
  source 1..21: mol_type = other DNA
  misc_feature 1..21: note = n-mer motif encoding polynucleotide
aactcccacaccgacagagga

SEQ ID NO: 6524 - DNA, 21 bp, synthetic construct
  misc_feature 1..21: note = n-mer motif encoding polynucleotide
  source 1..21: mol_type = other DNA
gtggctggggggacttcggag

SEQ ID NO: 6525 - DNA, 21 bp, synthetic construct
  source 1..21: mol_type = other DNA
  misc_feature 1..21: note = n-mer motif encoding polynucleotide
gtcgacgcacacagggctaac

SEQ ID NO: 6526 - DNA, 21 bp, synthetic construct
  misc_feature 1..21: note = n-mer motif encoding polynucleotide
  source 1..21: mol_type = other DNA
cgggcagacatgactccctta

SEQ ID NO: 6527 - DNA, 21 bp, synthetic construct
  misc_feature 1..21: note = n-mer motif encoding polynucleotide
  source 1..21: mol_type = other DNA
ggacacgaacaaactgacgca

SEQ ID NO: 6528 - DNA, 21 bp, synthetic construct
  source 1..21: mol_type = other DNA
  misc_feature 1..21: note = n-mer motif encoding polynucleotide
tacatcgcgggaggcgaccaa

SEQ ID NO: 6529 - DNA, 21 bp, synthetic construct
  misc_feature 1..21: note = n-mer motif encoding polynucleotide
  source 1..21: mol_type = other DNA
tacggcgacctaactacagtc

SEQ ID NO: 6530 - DNA, 21 bp, synthetic construct
  misc_feature 1..21: note = n-mer motif encoding polynucleotide
  source 1..21: mol_type = other DNA
agattagacctgcaagaacac

SEQ ID NO: 6531 - DNA, 21 bp, synthetic construct
  misc_feature 1..21: note = n-mer motif encoding polynucleotide
  source 1..21: mol_type = other DNA
caccttaacccggcggcccaa

SEQ ID NO: 6532 - DNA, 21 bp, synthetic construct
  source 1..21: mol_type = other DNA
  misc_feature 1..21: note = n-mer motif encoding polynucleotide
ggggttaacgaacaaacaaac

SEQ ID NO: 6533 - DNA, 21 bp, synthetic construct
  source 1..21: mol_type = other DNA
  misc_feature 1..21: note = n-mer motif encoding polynucleotide
cgtcggttgagtacggatctt

SEQ ID NO: 6534 - DNA, 21 bp, synthetic construct
  source 1..21: mol_type = other DNA
  misc_feature 1..21: note = n-mer motif encoding polynucleotide
ggatccacaggcctacccccg

SEQ ID NO: 6535 - DNA, 21 bp, synthetic construct
  misc_feature 1..21: note = n-mer motif encoding polynucleotide
  source 1..21: mol_type = other DNA
gacgacatggtcaaaaactca

SEQ ID NO: 6536 - DNA, 21 bp, synthetic construct
  source 1..21: mol_type = other DNA
  misc_feature 1..21: note = n-mer motif encoding polynucleotide
gttatagacctagtcactcgc

SEQ ID NO: 6537 - DNA, 21 bp, synthetic construct
  source 1..21: mol_type = other DNA
  misc_feature 1..21: note = n-mer motif encoding polynucleotide
ggaggccttaccaacggtcta

SEQ ID NO: 6538 - DNA, 21 bp, synthetic construct
  source 1..21: mol_type = other DNA
  misc_feature 1..21: note = n-mer motif encoding polynucleotide
cgtatggaggagactgcttat

SEQ ID NO: 6539 - DNA, 21 bp, synthetic construct
  misc_feature 1..21: note = n-mer motif encoding polynucleotide
  source 1..21: mol_type = other DNA
accgacatctccggttacgga

SEQ ID NO: 6540 - DNA, 21 bp, synthetic construct
  source 1..21: mol_type = other DNA
  misc_feature 1..21: note = n-mer motif encoding polynucleotide
caggttaatcataatactagt

SEQ ID NO: 6541 - DNA, 21 bp, synthetic construct
  misc_feature 1..21: note = n-mer motif encoding polynucleotide
  source 1..21: mol_type = other DNA
gcgactactgaggatgttcgt

SEQ ID NO: 6542 - DNA, 21 bp, synthetic construct
  source 1..21: mol_type = other DNA
  misc_feature 1..21: note = n-mer motif encoding polynucleotide
tggagcatcaaaaaccaaaca

SEQ ID NO: 6543 - DNA, 21 bp, synthetic construct
  misc_feature 1..21: note = n-mer motif encoding polynucleotide
  source 1..21: mol_type = other DNA
tcccctaccagcaacacaata

SEQ ID NO: 6544 - DNA, 21 bp, synthetic construct
  source 1..21: mol_type = other DNA
  misc_feature 1..21: note = n-mer motif encoding polynucleotide
atgaaaaactctggattcgac

SEQ ID NO: 6545 - DNA, 21 bp, synthetic construct
  misc_feature 1..21: note = n-mer motif encoding polynucleotide
  source 1..21: mol_type = other DNA
cttgttgctgagcgtttgccg

SEQ ID NO: 6546 - DNA, 21 bp, synthetic construct
  misc_feature 1..21: note = n-mer motif encoding polynucleotide
  source 1..21: mol_type = other DNA
ggtgaaactaacttcccaact

SEQ ID NO: 6547 - DNA, 21 bp, synthetic construct
  source 1..21: mol_type = other DNA
  misc_feature 1..21: note = n-mer motif encoding polynucleotide
aatggtaagctgggtacgact

SEQ ID NO: 6548 - DNA, 21 bp, synthetic construct
  source 1..21: mol_type = other DNA
  misc_feature 1..21: note = n-mer motif encoding polynucleotide
aacttagtagcgtacacgaaa

SEQ ID NO: 6549 - DNA, 21 bp, synthetic construct
  source 1..21: mol_type = other DNA
  misc_feature 1..21: note = n-mer motif encoding polynucleotide
tggcagcttacgacgagtcat

SEQ ID NO: 6550 - DNA, 21 bp, synthetic construct
  misc_feature 1..21: note = n-mer motif encoding polynucleotide
  source 1..21: mol_type = other DNA
agtttggacctaggaggcaac

SEQ ID NO: 6551 - DNA, 21 bp, synthetic construct
  misc_feature 1..21: note = n-mer motif encoding polynucleotide
  source 1..21: mol_type = other DNA
aacgaaagcaccaaagaatct

SEQ ID NO: 6552 - DNA, 21 bp, synthetic construct
  misc_feature 1..21: note = n-mer motif encoding polynucleotide
  source 1..21: mol_type = other DNA
ggttttgatggtaagcagctt

SEQ ID NO: 6553 - DNA, 21 bp, synthetic construct
  source 1..21: mol_type = other DNA
  misc_feature 1..21: note = n-mer motif encoding polynucleotide
catctgtatatttcggcggat

SEQ ID NO: 6554 - DNA, 21 bp, synthetic construct
  source 1..21: mol_type = other DNA
  misc_feature 1..21: note = n-mer motif encoding polynucleotide
ttacttccaaacaacacccac

SEQ ID NO: 6555 - DNA, 21 bp, synthetic construct
  misc_feature 1..21: note = n-mer motif encoding polynucleotide
  source 1..21: mol_type = other DNA
tccggaatggccggcctttcc

SEQ ID NO: 6556 - DNA, 21 bp, synthetic construct
  source 1..21: mol_type = other DNA
  misc_feature 1..21: note = n-mer motif encoding polynucleotide
atcacctcactccccgaaacc

SEQ ID NO: 6557 - DNA, 21 bp, synthetic construct
  source 1..21: mol_type = other DNA
  misc_feature 1..21: note = n-mer motif encoding polynucleotide
gagcttaaggagagtcagaag

SEQ ID NO: 6558 - DNA, 21 bp, synthetic construct
  source 1..21: mol_type = other DNA
  misc_feature 1..21: note = n-mer motif encoding polynucleotide
aatattgtgcaggattatccg

SEQ ID NO: 6559 - DNA, 21 bp, synthetic construct
  misc_feature 1..21: note = n-mer motif encoding polynucleotide
  source 1..21: mol_type = other DNA
tcagaaaacacctctgtaccc

SEQ ID NO: 6560 - DNA, 21 bp, synthetic construct
  misc_feature 1..21: note = n-mer motif encoding polynucleotide
  source 1..21: mol_type = other DNA
gaccccaaccaacccaaaaca

SEQ ID NO: 6561 - DNA, 21 bp, synthetic construct
  misc_feature 1..21: note = n-mer motif encoding polynucleotide
  source 1..21: mol_type = other DNA
gcgggtttggatgtgaatacg

SEQ ID NO: 6562 - DNA, 21 bp, synthetic construct
  misc_feature 1..21: note = n-mer motif encoding polynucleotide
  source 1..21: mol_type = other DNA
tctcatgagatgaataatggt

SEQ ID NO: 6563 - DNA, 21 bp, synthetic construct
  misc_feature 1..21: note = n-mer motif encoding polynucleotide
  source 1..21: mol_type = other DNA
tcttacgccataaaccaatca

SEQ ID NO: 6564 - DNA, 21 bp, synthetic construct
  misc_feature 1..21: note = n-mer motif encoding polynucleotide
  source 1..21: mol_type = other DNA
ggtcatctgcctgcggctaag

SEQ ID NO: 6565 - DNA, 21 bp, synthetic construct
  source 1..21: mol_type = other DNA
  misc_feature 1..21: note = n-mer motif encoding polynucleotide
gagttgggtaataagacggct

SEQ ID NO: 6566 - DNA, 21 bp, synthetic construct
  source 1..21: mol_type = other DNA
  misc_feature 1..21: note = n-mer motif encoding polynucleotide
cttgagtctactcgtaaggct

SEQ ID NO: 6567 - DNA, 21 bp, synthetic construct
  misc_feature 1..21: note = n-mer motif encoding polynucleotide
  source 1..21: mol_type = other DNA
actcaaggcaactctgaagca

SEQ ID NO: 6568 - DNA, 21 bp, synthetic construct
  misc_feature 1..21: note = n-mer motif encoding polynucleotide
  source 1..21: mol_type = other DNA
atctctatagactccgctatg

SEQ ID NO: 6569 - DNA, 21 bp, synthetic construct
  source 1..21: mol_type = other DNA
  misc_feature 1..21: note = n-mer motif encoding polynucleotide
gagtttcagaggattcgtgag

SEQ ID NO: 6570 - DNA, 21 bp, synthetic construct
  misc_feature 1..21: note = n-mer motif encoding polynucleotide
  source 1..21: mol_type = other DNA
gctagtctctccgcaccagcc

SEQ ID NO: 6571 - DNA, 21 bp, synthetic construct
  source 1..21: mol_type = other DNA
  misc_feature 1..21: note = n-mer motif encoding polynucleotide
gacagccaaatcacaagacta

SEQ ID NO: 6572 - DNA, 21 bp, synthetic construct
  misc_feature 1..21: note = n-mer motif encoding polynucleotide
  source 1..21: mol_type = other DNA
ggccacgaaaacatgggcgtg

SEQ ID NO: 6573 - DNA, 21 bp, synthetic construct
  source 1..21: mol_type = other DNA
  misc_feature 1..21: note = n-mer motif encoding polynucleotide
atgtcggcggggcatcctacg

SEQ ID NO: 6574 - DNA, 21 bp, synthetic construct
  misc_feature 1..21: note = n-mer motif encoding polynucleotide
  source 1..21: mol_type = other DNA
cacgctccaagcggcgccata

SEQ ID NO: 6575 - DNA, 21 bp, synthetic construct
  source 1..21: mol_type = other DNA
  misc_feature 1..21: note = n-mer motif encoding polynucleotide
acgactattactaattcggtt

SEQ ID NO: 6576 - DNA, 21 bp, synthetic construct
  misc_feature 1..21: note = n-mer motif encoding polynucleotide
  source 1..21: mol_type = other DNA
cctcagcatcagcatgagcat

SEQ ID NO: 6577 - DNA, 21 bp, synthetic construct
  misc_feature 1..21: note = n-mer motif encoding polynucleotide
  source 1..21: mol_type = other DNA
caatactcgatggacacgcgc

SEQ ID NO: 6578 - DNA, 21 bp, synthetic construct
  misc_feature 1..21: note = n-mer motif encoding polynucleotide
  source 1..21: mol_type = other DNA
ctttatgaggttggtactcct

SEQ ID NO: 6579 - DNA, 21 bp, synthetic construct
  misc_feature 1..21: note = n-mer motif encoding polynucleotide
  source 1..21: mol_type = other DNA
ggtgagactatgcgtcataat

SEQ ID NO: 6580 - DNA, 21 bp, synthetic construct
  misc_feature 1..21: note = n-mer motif encoding polynucleotide
  source 1..21: mol_type = other DNA
atgacaataaccgtcgaaccg

SEQ ID NO: 6581 - DNA, 21 bp, synthetic construct
  misc_feature 1..21: note = n-mer motif encoding polynucleotide
  source 1..21: mol_type = other DNA
gcgcagcatcctgagcgttcg

SEQ ID NO: 6582 - DNA, 21 bp, synthetic construct
  misc_feature 1..21: note = n-mer motif encoding polynucleotide
  source 1..21: mol_type = other DNA
acgcatgttgctaagcctgat

SEQ ID NO: 6583 - DNA, 21 bp, synthetic construct
  source 1..21: mol_type = other DNA
  misc_feature 1..21: note = n-mer motif encoding polynucleotide
atgactgctaacttggtggaa

SEQ ID NO: 6584 - DNA, 21 bp, synthetic construct
  source 1..21: mol_type = other DNA
  misc_feature 1..21: note = n-mer motif encoding polynucleotide
aataggcagcgggattttgag

SEQ ID NO: 6585 - DNA, 21 bp, synthetic construct
  misc_feature 1..21: note = n-mer motif encoding polynucleotide
  source 1..21: mol_type = other DNA
tcaaacagcgccgacgcgggg

SEQ ID NO: 6586 - DNA, 21 bp, synthetic construct
  misc_feature 1..21: note = n-mer motif encoding polynucleotide
  source 1..21: mol_type = other DNA
ggtgagtatggtgcgtcggtt

SEQ ID NO: 6587 - DNA, 21 bp, synthetic construct
  misc_feature 1..21: note = n-mer motif encoding polynucleotide
  source 1..21: mol_type = other DNA
gacggcatggtcaggtcgaca

SEQ ID NO: 6588 - DNA, 21 bp, synthetic construct
  source 1..21: mol_type = other DNA
  misc_feature 1..21: note = n-mer motif encoding polynucleotide
aatggtcagctgctggctaat

SEQ ID NO: 6589 - DNA, 21 bp, synthetic construct
  misc_feature 1..21: note = n-mer motif encoding polynucleotide
  source 1..21: mol_type = other DNA
tccgcggggatgacattggac

SEQ ID NO: 6590 - DNA, 21 bp, synthetic construct
  misc_feature 1..21: note = n-mer motif encoding polynucleotide
  source 1..21: mol_type = other DNA
gatcatgtgcatctgacttat

SEQ ID NO: 6591 - DNA, 21 bp, synthetic construct
  source 1..21: mol_type = other DNA
  misc_feature 1..21: note = n-mer motif encoding polynucleotide
acgacactaacgcaaacggac

SEQ ID NO: 6592 - DNA, 21 bp, synthetic construct
  misc_feature 1..21: note = n-mer motif encoding polynucleotide
  source 1..21: mol_type = other DNA
gtgcagttggctgatgggcat

SEQ ID NO: 6593 - DNA, 21 bp, synthetic construct
  source 1..21: mol_type = other DNA
  misc_feature 1..21: note = n-mer motif encoding polynucleotide
actgactcatctgcagactcc

SEQ ID NO: 6594 - DNA, 21 bp, synthetic construct
  source 1..21: mol_type = other DNA
  misc_feature 1..21: note = n-mer motif encoding polynucleotide
gcgatgaatgtgcggagtgat

SEQ ID NO: 6595 - DNA, 21 bp, synthetic construct
  misc_feature 1..21: note = n-mer motif encoding polynucleotide
  source 1..21: mol_type = other DNA
ggtgatatttcttatagggtt

SEQ ID NO: 6596 - DNA, 21 bp, synthetic construct
  source 1..21: mol_type = other DNA
  misc_feature 1..21: note = n-mer motif encoding polynucleotide
atggggtatgttgatagtctg

SEQ ID NO: 6597 - DNA, 21 bp, synthetic construct
  source 1..21: mol_type = other DNA
  misc_feature 1..21: note = n-mer motif encoding polynucleotide
ctttatttggcggcggcttcg

SEQ ID NO: 6598 - DNA, 21 bp, synthetic construct
  source 1..21: mol_type = other DNA
  misc_feature 1..21: note = n-mer motif encoding polynucleotide
tcatccccagactcgtacaga

SEQ ID NO: 6599 - DNA, 21 bp, synthetic construct
  source 1..21: mol_type = other DNA
  misc_feature 1..21: note = n-mer motif encoding polynucleotide
agttataatgtggatctgcat

SEQ ID NO: 6600 - DNA, 21 bp, synthetic construct
  misc_feature 1..21: note = n-mer motif encoding polynucleotide
  source 1..21: mol_type = other DNA
caacacaccgcccaccccatg

SEQ ID NO: 6601 - DNA, 21 bp, synthetic construct
  source 1..21: mol_type = other DNA
  misc_feature 1..21: note = n-mer motif encoding polynucleotide
gcagttatggctacacacccc

SEQ ID NO: 6602 - DNA, 21 bp, synthetic construct
  misc_feature 1..21: note = n-mer motif encoding polynucleotide
  source 1..21: mol_type = other DNA
attagtccgagtgcttctaat

SEQ ID NO: 6603 - DNA, 21 bp, synthetic construct
  misc_feature 1..21: note = n-mer motif encoding polynucleotide
  source 1..21: mol_type = other DNA
actttggataataatcattct

SEQ ID NO: 6604 - DNA, 21 bp, synthetic construct
  misc_feature 1..21: note = n-mer motif encoding polynucleotide
  source 1..21: mol_type = other DNA
agtgggtcttatgtggcgacg

SEQ ID NO: 6605 - DNA, 21 bp, synthetic construct
  source 1..21: mol_type = other DNA
  misc_feature 1..21: note = n-mer motif encoding polynucleotide
atggcggctccgccggagcat

SEQ ID NO: 6606 - DNA, 21 bp, synthetic construct
  source 1..21: mol_type = other DNA
  misc_feature 1..21: note = n-mer motif encoding polynucleotide
cagactgcgtctggtgatact

SEQ ID NO: 6607 - DNA, 21 bp, synthetic construct
  misc_feature 1..21: note = n-mer motif encoding polynucleotide
  source 1..21: mol_type = other DNA
gagtctaagactgtggttatt

SEQ ID NO: 6608 - DNA, 21 bp, synthetic construct
  source 1..21: mol_type = other DNA
  misc_feature 1..21: note = n-mer motif encoding polynucleotide
acggtattaccacaatcagac

SEQ ID NO: 6609 - DNA, 21 bp, synthetic construct
  misc_feature 1..21: note = n-mer motif encoding polynucleotide
  source 1..21: mol_type = other DNA
ccattaaacgcgaacggctcc

SEQ ID NO: 6610 - DNA, 21 bp, synthetic construct
  misc_feature 1..21: note = n-mer motif encoding polynucleotide
  source 1..21: mol_type = other DNA
cccctgaacacaggattaacc

SEQ ID NO: 6611 - DNA, 21 bp, synthetic construct
  misc_feature 1..21: note = n-mer motif encoding polynucleotide
  source 1..21: mol_type = other DNA
gccataacgataataggcact

SEQ ID NO: 6612 - DNA, 21 bp, synthetic construct
  misc_feature 1..21: note = n-mer motif encoding polynucleotide
  source 1..21: mol_type = other DNA
aatcctagtgcgattagttat

SEQ ID NO: 6613 - DNA, 21 bp, synthetic construct
  misc_feature 1..21: note = n-mer motif encoding polynucleotide
  source 1..21: mol_type = other DNA
acagaacacgaaaaatccact

SEQ ID NO: 6614 - DNA, 21 bp, synthetic construct
  source 1..21: mol_type = other DNA
  misc_feature 1..21: note = n-mer motif encoding polynucleotide
gctgagagtcagctggcgtcg

SEQ ID NO: 6615 - DNA, 21 bp, synthetic construct
  source 1..21: mol_type = other DNA
  misc_feature 1..21: note = n-mer motif encoding polynucleotide
gtgcttaagggtacgtttccg

SEQ ID NO: 6616 - DNA, 21 bp, synthetic construct
  source 1..21: mol_type = other DNA
  misc_feature 1..21: note = n-mer motif encoding polynucleotide
tcgttcgccgaaataacgact

SEQ ID NO: 6617 - DNA, 21 bp, synthetic construct
  source 1..21: mol_type = other DNA
  misc_feature 1..21: note = n-mer motif encoding polynucleotide
ccgttaaacggccgcgtaacc

SEQ ID NO: 6618 - DNA, 21 bp, synthetic construct
  misc_feature 1..21: note = n-mer motif encoding polynucleotide
  source 1..21: mol_type = other DNA
tccgaacgcccccaatcgtca

SEQ ID NO: 6619 - DNA, 21 bp, synthetic construct
  source 1..21: mol_type = other DNA
  misc_feature 1..21: note = n-mer motif encoding polynucleotide
gctcagcttcaggattcggtg

SEQ ID NO: 6620 - DNA, 21 bp, synthetic construct
  source 1..21: mol_type = other DNA
  misc_feature 1..21: note = n-mer motif encoding polynucleotide
cccaaccgtgtaacagcaccc

SEQ ID NO: 6621 - DNA, 21 bp, synthetic construct
  misc_feature 1..21: note = n-mer motif encoding polynucleotide
  source 1..21: mol_type = other DNA
gcgcttattgtttcgagtatg

SEQ ID NO: 6622 - DNA, 21 bp, synthetic construct
  source 1..21: mol_type = other DNA
  misc_feature 1..21: note = n-mer motif encoding polynucleotide
gcgcatggtgcttttccggtt

SEQ ID NO: 6623 - DNA, 21 bp, synthetic construct
  misc_feature 1..21: note = n-mer motif encoding polynucleotide
  source 1..21: mol_type = other DNA
gaggcttatcagactgagaag

SEQ ID NO: 6624 - DNA, 21 bp, synthetic construct
  source 1..21: mol_type = other DNA
  misc_feature 1..21: note = n-mer motif encoding polynucleotide
gctgcggcttcgcctttggct

SEQ ID NO: 6625 - DNA, 21 bp, synthetic construct
  source 1..21: mol_type = other DNA
  misc_feature 1..21: note = n-mer motif encoding polynucleotide
ccccaagccactctcaacaac

SEQ ID NO: 6626 - DNA, 21 bp, synthetic construct
  misc_feature 1..21: note = n-mer motif encoding polynucleotide
  source 1..21: mol_type = other DNA
acgaggggtgatatggagttt

SEQ ID NO: 6627 - DNA, 21 bp, synthetic construct
  source 1..21: mol_type = other DNA
  misc_feature 1..21: note = n-mer motif encoding polynucleotide
agcaacctaggcgaagcatct

SEQ ID NO: 6628 - DNA, 21 bp, synthetic construct
  misc_feature 1..21: note = n-mer motif encoding polynucleotide
  source 1..21: mol_type = other DNA
ggaatcaccggaagccccggc

SEQ ID NO: 6629 - DNA, 21 bp, synthetic construct
  source 1..21: mol_type = other DNA
  misc_feature 1..21: note = n-mer motif encoding polynucleotide
gggtttgagacgagtagtcct

SEQ ID NO: 6630 - DNA, 21 bp, synthetic construct
  source 1..21: mol_type = other DNA
  misc_feature 1..21: note = n-mer motif encoding polynucleotide
cccgcgagaagcgacgccctt

SEQ ID NO: 6631 - DNA, 21 bp, synthetic construct
  source 1..21: mol_type = other DNA
  misc_feature 1..21: note = n-mer motif encoding polynucleotide
catgctaattatgttgaggtg

SEQ ID NO: 6632 - DNA, 21 bp, synthetic construct
  misc_feature 1..21: note = n-mer motif encoding polynucleotide
  source 1..21: mol_type = other DNA
gtgactcgtagtacgaaggag

SEQ ID NO: 6633 - DNA, 21 bp, synthetic construct
  misc_feature 1..21: note = n-mer motif encoding polynucleotide
  source 1..21: mol_type = other DNA
gatgttgcgttgaggtcgaat

SEQ ID NO: 6634 - DNA, 21 bp, synthetic construct
  source 1..21: mol_type = other DNA
  misc_feature 1..21: note = n-mer motif encoding polynucleotide
gagtctgatttgcgtcagcgg

SEQ ID NO: 6635 - DNA, 21 bp, synthetic construct
  source 1..21: mol_type = other DNA
  misc_feature 1..21: note = n-mer motif encoding polynucleotide
ccgttactcgcagcgaacccg

SEQ ID NO: 6636 - DNA, 21 bp, synthetic construct
  source 1..21: mol_type = other DNA
  misc_feature 1..21: note = n-mer motif encoding polynucleotide
ataaacgccgcgcacaggccc

SEQ ID NO: 6637 - DNA, 21 bp, synthetic construct
  misc_feature 1..21: note = n-mer motif encoding polynucleotide
  source 1..21: mol_type = other DNA
gctcggagagacgtaaactcg

SEQ ID NO: 6638 - DNA, 21 bp, synthetic construct
  misc_feature 1..21: note = n-mer motif encoding polynucleotide
  source 1..21: mol_type = other DNA
agtatggataaggtggagaag

SEQ ID NO: 6639 - DNA, 21 bp, synthetic construct
  source 1..21: mol_type = other DNA
  misc_feature 1..21: note = n-mer motif encoding polynucleotide
aacgtcagcgcacgggaaaca

SEQ ID NO: 6640 - DNA, 21 bp, synthetic construct
  misc_feature 1..21: note = n-mer motif encoding polynucleotide
  source 1..21: mol_type = other DNA
ctgacgacggctggtatgtgg

SEQ ID NO: 6641 - DNA, 21 bp, synthetic construct
  misc_feature 1..21: note = n-mer motif encoding polynucleotide
  source 1..21: mol_type = other DNA
gcgcgggcagaaggggtcttc

SEQ ID NO: 6642 - DNA, 21 bp, synthetic construct
  misc_feature 1..21: note = n-mer motif encoding polynucleotide
  source 1..21: mol_type = other DNA
ccgagtgatcatatgcggact

SEQ ID NO: 6643 - DNA, 21 bp, synthetic construct
  misc_feature 1..21: note = n-mer motif encoding polynucleotide
  source 1..21: mol_type = other DNA
agtaggacggttattttgtcg

SEQ ID NO: 6644 - DNA, 21 bp, synthetic construct
  misc_feature 1..21: note = n-mer motif encoding polynucleotide
  source 1..21: mol_type = other DNA
cagagtaatgctgctgagggt

SEQ ID NO: 6645 - DNA, 21 bp, synthetic construct
  source 1..21: mol_type = other DNA
  misc_feature 1..21: note = n-mer motif encoding polynucleotide
tggaccgaaacggccgctcac

SEQ ID NO: 6646 - DNA, 21 bp, synthetic construct
  misc_feature 1..21: note = n-mer motif encoding polynucleotide
  source 1..21: mol_type = other DNA
aaggagaatcagcttagtaag

SEQ ID NO: 6647 - protein, 7 aa, synthetic construct
  REGION 1..7: note = n-mer motif
RGDLSTP

SEQ ID NO: 6648 - protein, 7 aa, synthetic construct
  REGION 1..7: note = n-mer motif
RGDLSTP

SEQ ID NO: 6649 - protein, 7 aa, synthetic construct
  REGION 1..7: note = n-mer motif
RGDLTTP

SEQ ID NO: 6650 - protein, 7 aa, synthetic construct
  REGION 1..7: note = n-mer motif
RGDLNQY

SEQ ID NO: 6651 - protein, 7 aa, synthetic construct
  REGION 1..7: note = n-mer motif
RGDQLYH

SEQ ID NO: 6652 - protein, 7 aa, synthetic construct
  REGION 1..7: note = n-mer motif
RGDATEL

SEQ ID NO: 6653 - protein, 7 aa, synthetic construct
  REGION 1..7: note = n-mer motif
RGDTMSK

SEQ ID NO: 6654 - protein, 7 aa, synthetic construct
  REGION 1..7: note = n-mer motif
RGDLNQY

SEQ ID NO: 6655 - protein, 7 aa, synthetic construct
  REGION 1..7: note = n-mer motif
RGDLTTP

SEQ ID NO: 6656 - protein, 7 aa, synthetic construct
  REGION 1..7: note = n-mer motif
RGDMINT

SEQ ID NO: 6657 - protein, 7 aa, synthetic construct
  REGION 1..7: note = n-mer motif
RGDTMSK

SEQ ID NO: 6658 - protein, 7 aa, synthetic construct
  REGION 1..7: note = n-mer motif
RGDTMNY

SEQ ID NO: 6659 - protein, 7 aa, synthetic construct
  REGION 1..7: note = n-mer motif
RGDATEL

SEQ ID NO: 6660 - protein, 7 aa, synthetic construct
  REGION 1..7: note = n-mer motif
RLDLQVH

SEQ ID NO: 6661 - protein, 7 aa, synthetic construct
  REGION 1..7: note = n-mer motif
RGDVAAK

SEQ ID NO: 6662 - protein, 7 aa, synthetic construct
  REGION 1..7: note = n-mer motif
RGDLNDS

SEQ ID NO: 6663 - protein, 7 aa, synthetic construct
  REGION 1..7: note = n-mer motif
RGDLNDS

SEQ ID NO: 6664 - protein, 7 aa, synthetic construct
  REGION 1..7: note = n-mer motif
SYGNTHD

SEQ ID NO: 6665 - protein, 7 aa, synthetic construct
  REGION 1..7: note = n-mer motif
RLDLQVN

SEQ ID NO: 6666 - protein, 7 aa, synthetic construct
  REGION 1..7: note = n-mer motif
KAGQLVE

SEQ ID NO: 6667 - protein, 7 aa, synthetic construct
  REGION 1..7: note = n-mer motif
DQTASIV

SEQ ID NO: 6668 - protein, 7 aa, synthetic construct
  REGION 1..7: note = n-mer motif
YIAAGEQ

SEQ ID NO: 6669 - protein, 7 aa, synthetic construct
  REGION 1..7: note = n-mer motif
AVVLNSN

SEQ ID NO: 6670 - protein, 7 aa, synthetic construct
  REGION 1..7: note = n-mer motif
SKGNEQM

SEQ ID NO: 6671 - protein, 7 aa, synthetic construct
  REGION 1..7: note = n-mer motif
ANPNILD

SEQ ID NO: 6672 - protein, 7 aa, synthetic construct
  REGION 1..7: note = n-mer motif
HNKPNGD

SEQ ID NO: 6673 - protein, 7 aa, synthetic construct
  REGION 1..7: note = n-mer motif
DKTEMLQ

SEQ ID NO: 6674 - protein, 7 aa, synthetic construct
  REGION 1..7: note = n-mer motif
TEQSYSR

SEQ ID NO: 6675 - protein, 7 aa, synthetic construct
  REGION 1..7: note = n-mer motif
TVMMSTR

SEQ ID NO: 6676 - protein, 7 aa, synthetic construct
  REGION 1..7: note = n-mer motif
VSTYLLA

SEQ ID NO: 6677 - protein, 7 aa, synthetic construct
  REGION 1..7: note = n-mer motif
PNVTQSY

SEQ ID NO: 6678 - protein, 7 aa, synthetic construct
  REGION 1..7: note = n-mer motif
MSNLGYE

SEQ ID NO: 6679 - protein, 7 aa, synthetic construct
  REGION 1..7: note = n-mer motif
TMGANGT

SEQ ID NO: 6680 - protein, 7 aa, synthetic construct
  REGION 1..7: note = n-mer motif
NVNAQSR

SEQ ID NO: 6681 - protein, 7 aa, synthetic construct
  REGION 1..7: note = n-mer motif
DQNFERR

SEQ ID NO: 6682 - protein, 7 aa, synthetic construct
  REGION 1..7: note = n-mer motif
NTYTPGK

SEQ ID NO: 6683 - protein, 7 aa, synthetic construct
  REGION 1..7: note = n-mer motif
RGDMINT

SEQ ID NO: 6684 - protein, 7 aa, synthetic construct
  REGION 1..7: note = n-mer motif
AQFESGR

SEQ ID NO: 6685 - protein, 7 aa, synthetic construct
  REGION 1..7: note = n-mer motif
TAYQAGL

SEQ ID NO: 6686 - protein, 7 aa, synthetic construct
  REGION 1..7: note = n-mer motif
SVSSVVL

SEQ ID NO: 6687 - protein, 7 aa, synthetic construct
  REGION 1..7: note = n-mer motif
GLSKASD

SEQ ID NO: 6688 - protein, 7 aa, synthetic construct
  REGION 1..7: note = n-mer motif
WNGNATQ

SEQ ID NO: 6689 - protein, 7 aa, synthetic construct
  REGION 1..7: note = n-mer motif
TAGGERA

SEQ ID NO: 6690 - protein, 7 aa, synthetic construct
  REGION 1..7: note = n-mer motif
YTSQTST

SEQ ID NO: 6691 - protein, 7 aa, synthetic construct
  REGION 1..7: note = n-mer motif
ANIENTS

SEQ ID NO: 6692 - protein, 7 aa, synthetic construct
  REGION 1..7: note = n-mer motif
ELSVPKP

SEQ ID NO: 6693 - protein, 7 aa, synthetic construct
  REGION 1..7: note = n-mer motif
DPGRTGT

SEQ ID NO: 6694 - protein, 7 aa, synthetic construct
  REGION 1..7: note = n-mer motif
DRPNNMT

SEQ ID NO: 6695 - protein, 7 aa, synthetic construct
  REGION 1..7: note = n-mer motif
YSTDLRM

SEQ ID NO: 6696 - protein, 7 aa, synthetic construct
  REGION 1..7: note = n-mer motif
QSVNSTS

SEQ ID NO: 6697 - protein, 7 aa, synthetic construct
  REGION 1..7: note = n-mer motif
AAQLVSP

SEQ ID NO: 6698 - protein, 7 aa, synthetic construct
  REGION 1..7: note = n-mer motif
LGGNSRF

SEQ ID NO: 6699 - protein, 7 aa, synthetic construct
  REGION 1..7: note = n-mer motif
ATLNNSY

SEQ ID NO: 6700 - protein, 7 aa, synthetic construct
  REGION 1..7: note = n-mer motif
RLDVGSP

SEQ ID NO: 6701 - protein, 7 aa, synthetic construct
  REGION 1..7: note = n-mer motif
YRGREDW

SEQ ID NO: 6702 - protein, 7 aa, synthetic construct
  REGION 1..7: note = n-mer motif
RGDLSTP

SEQ ID NO: 6703 - protein, 7 aa, synthetic construct
  REGION 1..7: note = n-mer motif
SGLSHGQ

SEQ ID NO: 6704 - protein, 7 aa, synthetic construct
  REGION 1..7: note = n-mer motif
EHATAKQ

SEQ ID NO: 6705 - protein, 7 aa, synthetic construct
  REGION 1..7: note = n-mer motif
GAEAGRQ

SEQ ID NO: 6706 - protein, 7 aa, synthetic construct
  REGION 1..7: note = n-mer motif
ISGSTTH

SEQ ID NO: 6707 - protein, 7 aa, synthetic construct
  REGION 1..7: note = n-mer motif
GTVVPGS

SEQ ID NO: 6708 - protein, 7 aa, synthetic construct
  REGION 1..7: note = n-mer motif
HNNNMLN

SEQ ID NO: 6709 - protein, 7 aa, synthetic construct
  REGION 1..7: note = n-mer motif
RLTDTMH

SEQ ID NO: 6710 - protein, 7 aa, synthetic construct
  REGION 1..7: note = n-mer motif
NTYPFNA

SEQ ID NO: 6711 - protein, 7 aa, synthetic construct
  REGION 1..7: note = n-mer motif
STTTGHM

SEQ ID NO: 6712 - protein, 7 aa, synthetic construct
  REGION 1..7: note = n-mer motif
VHNPTTT

SEQ ID NO: 6713 - protein, 7 aa, synthetic construct
  REGION 1..7: note = n-mer motif
NLQVNAN

SEQ ID NO: 6714 - protein, 7 aa, synthetic construct
  REGION 1..7: note = n-mer motif
RYGESIE

SEQ ID NO: 6715 - protein, 7 aa, synthetic construct
  REGION 1..7: note = n-mer motif
NTTPPNH

SEQ ID NO: 6716 - protein, 7 aa, synthetic construct
  REGION 1..7: note = n-mer motif
NTLQNSH

SEQ ID NO: 6717 - protein, 7 aa, synthetic construct
  REGION 1..7: note = n-mer motif
SLNNMGS

SEQ ID NO: 6718 - protein, 7 aa, synthetic construct
  REGION 1..7: note = n-mer motif
RNENVNA

SEQ ID NO: 6719 - protein, 7 aa, synthetic construct
  REGION 1..7: note = n-mer motif
AVHATSS

SEQ ID NO: 6720 - protein, 7 aa, synthetic construct
  REGION 1..7: note = n-mer motif
TQHLPST

SEQ ID NO: 6721 - protein, 7 aa, synthetic construct
  REGION 1..7: note = n-mer motif
SVLSQAN

SEQ ID NO: 6722 - protein, 7 aa, synthetic construct
  REGION 1..7: note = n-mer motif
SSSTEGQ

SEQ ID NO: 6723 - protein, 7 aa, synthetic construct
  REGION 1..7: note = n-mer motif
GRTDTPN

SEQ ID NO: 6724 - protein, 7 aa, synthetic construct
  REGION 1..7: note = n-mer motif
VQTHIGV

SEQ ID NO: 6725 - protein, 7 aa, synthetic construct
  REGION 1..7: note = n-mer motif
TSASENW

SEQ ID NO: 6726 - protein, 7 aa, synthetic construct
  REGION 1..7: note = n-mer motif
GKANDGS

SEQ ID NO: 6727 - protein, 7 aa, synthetic construct
  REGION 1..7: note = n-mer motif
VERNTDM

SEQ ID NO: 6728 - protein, 7 aa, synthetic construct
  REGION 1..7: note = n-mer motif
QNHASGE

SEQ ID NO: 6729 - protein, 7 aa, synthetic construct
  REGION 1..7: note = n-mer motif
YYEKLSA

SEQ ID NO: 6730 - protein, 7 aa, synthetic construct
  REGION 1..7: note = n-mer motif
FIANTNP

SEQ ID NO: 6731 - protein, 7 aa, synthetic construct
  REGION 1..7: note = n-mer motif
TSTASKQ

SEQ ID NO: 6732 - protein, 7 aa, synthetic construct
  REGION 1..7: note = n-mer motif
NNDNGFV

SEQ ID NO: 6733 - protein, 7 aa, synthetic construct
  REGION 1..7: note = n-mer motif
ANSIGGP

SEQ ID NO: 6734 - protein, 7 aa, synthetic construct
  REGION 1..7: note = n-mer motif
TGQLVGT

SEQ ID NO: 6735 - protein, 7 aa, synthetic construct
  REGION 1..7: note = n-mer motif
YSQSLSE

SEQ ID NO: 6736 - protein, 7 aa, synthetic construct
  REGION 1..7: note = n-mer motif
VYNGNVV

SEQ ID NO: 6737 - protein, 7 aa, synthetic construct
  REGION 1..7: note = n-mer motif
NSAESSR

SEQ ID NO: 6738 - protein, 7 aa, synthetic construct
  REGION 1..7: note = n-mer motif
TRNLSES

SEQ ID NO: 6739 - protein, 7 aa, synthetic construct
  REGION 1..7: note = n-mer motif
SMSDGLR

SEQ ID NO: 6740 - protein, 7 aa, synthetic construct
  REGION 1..7: note = n-mer motif
VGDQSRP

SEQ ID NO: 6741 - protein, 7 aa, synthetic construct
  REGION 1..7: note = n-mer motif
FTVNQDL

SEQ ID NO: 6742 - protein, 7 aa, synthetic construct
  REGION 1..7: note = n-mer motif
YHKYSTD

SEQ ID NO: 6743 - protein, 7 aa, synthetic construct
  REGION 1..7: note = n-mer motif
YGVQANS

SEQ ID NO: 6744 - protein, 7 aa, synthetic construct
  REGION 1..7: note = n-mer motif
LQTPGTT

SEQ ID NO: 6745 - protein, 7 aa, synthetic construct
  REGION 1..7: note = n-mer motif
YQQTSST

SEQ ID NO: 6746 - protein, 7 aa, synthetic construct
  REGION 1..7: note = n-mer motif
QTNTNDR

SEQ ID NO: 6747 - protein, 7 aa, synthetic construct
  REGION 1..7: note = n-mer motif
MDKSNNS

SEQ ID NO: 6748 - protein, 7 aa, synthetic construct
  REGION 1..7: note = n-mer motif
HLSQANH

SEQ ID NO: 6749 - protein, 7 aa, synthetic construct
  REGION 1..7: note = n-mer motif
VGASTAS

SEQ ID NO: 6750 - protein, 7 aa, synthetic construct
  REGION 1..7: note = n-mer motif
HNNNLQN

SEQ ID NO: 6751 - protein, 7 aa, synthetic construct
  REGION 1..7: note = n-mer motif
STYGNTY

SEQ ID NO: 6752 - protein, 7 aa, synthetic construct
  REGION 1..7: note = n-mer motif
RADVSWS

SEQ ID NO: 6753 - protein, 7 aa, synthetic construct
  REGION 1..7: note = n-mer motif
RGDNSTP

SEQ ID NO: 6754 - protein, 7 aa, synthetic construct
  REGION 1..7: note = n-mer motif
GRDYAMS

SEQ ID NO: 6755 - protein, 7 aa, synthetic construct
  REGION 1..7: note = n-mer motif
PNNEKNP

SEQ ID NO: 6756 - protein, 7 aa, synthetic construct
  REGION 1..7: note = n-mer motif
DNVNSQP

SEQ ID NO: 6757 - protein, 7 aa, synthetic construct
  REGION 1..7: note = n-mer motif
MGTEYRM

SEQ ID NO: 6758 - protein, 7 aa, synthetic construct
  REGION 1..7: note = n-mer motif
NQSINNI

SEQ ID NO: 6759 - protein, 7 aa, synthetic construct
  REGION 1..7: note = n-mer motif
AIDSIKQ

SEQ ID NO: 6760 - protein, 7 aa, synthetic construct
  REGION 1..7: note = n-mer motif
VESSYSR

SEQ ID NO: 6761 - protein, 7 aa, synthetic construct
  REGION 1..7: note = n-mer motif
GQYSQTL

SEQ ID NO: 6762 - protein, 7 aa, synthetic construct
  REGION 1..7: note = n-mer motif
TIQDHIK

SEQ ID NO: 6763 - protein, 7 aa, synthetic construct
  REGION 1..7: note = n-mer motif
NSSQWPN

SEQ ID NO: 6764 - protein, 7 aa, synthetic construct
  REGION 1..7: note = n-mer motif
TDNGLLV

SEQ ID NO: 6765 - protein, 7 aa, synthetic construct
  REGION 1..7: note = n-mer motif
VRETTHL

SEQ ID NO: 6766 - protein, 7 aa, synthetic construct
  REGION 1..7: note = n-mer motif
RGDMTRA

SEQ ID NO: 6767 - protein, 7 aa, synthetic construct
  REGION 1..7: note = n-mer motif
TYGITHD

SEQ ID NO: 6768 - protein, 7 aa, synthetic construct
  REGION 1..7: note = n-mer motif
TALNTYP

SEQ ID NO: 6769 - protein, 7 aa, synthetic construct
  REGION 1..7: note = n-mer motif
GGENRTP

SEQ ID NO: 6770 - protein, 7 aa, synthetic construct
  REGION 1..7: note = n-mer motif
YLQEKFP

SEQ ID NO: 6771 - protein, 7 aa, synthetic construct
  REGION 1..7: note = n-mer motif
LNLTNHN

SEQ ID NO: 6772 - protein, 7 aa, synthetic construct
  REGION 1..7: note = n-mer motif
GLASLHL

SEQ ID NO: 6773 - protein, 7 aa, synthetic construct
  REGION 1..7: note = n-mer motif
VEHVAHQ

SEQ ID NO: 6774 - protein, 7 aa, synthetic construct
  REGION 1..7: note = n-mer motif
SEHHAGI

SEQ ID NO: 6775 - protein, 7 aa, synthetic construct
  REGION 1..7: note = n-mer motif
EASNYER

SEQ ID NO: 6776 - protein, 7 aa, synthetic construct
  REGION 1..7: note = n-mer motif
PSNSERF

SEQ ID NO: 6777 - protein, 7 aa, synthetic construct
  REGION 1..7: note = n-mer motif
SPGNGLL

SEQ ID NO: 6778 - protein, 7 aa, synthetic construct
  REGION 1..7: note = n-mer motif
ILKSDAP

SEQ ID NO: 6779 - protein, 7 aa, synthetic construct
  REGION 1..7: note = n-mer motif
FDSANGR

SEQ ID NO: 6780 - protein, 7 aa, synthetic construct
  REGION 1..7: note = n-mer motif
DGKTTSN

SEQ ID NO: 6781 - protein, 7 aa, synthetic construct
  REGION 1..7: note = n-mer motif
TNYPEAN

SEQ ID NO: 6782 - protein, 7 aa, synthetic construct
  REGION 1..7: note = n-mer motif
RGDHSTP

SEQ ID NO: 6783 - protein, 7 aa, synthetic construct
  REGION 1..7: note = n-mer motif
QTTILAA

SEQ ID NO: 6784 - protein, 7 aa, synthetic construct
  REGION 1..7: note = n-mer motif
ATAHQDG

SEQ ID NO: 6785 - protein, 7 aa, synthetic construct
  REGION 1..7: note = n-mer motif
QALATTN

SEQ ID NO: 6786 - protein, 7 aa, synthetic construct
  REGION 1..7: note = n-mer motif
YNATPSQ

SEQ ID NO: 6787 - protein, 7 aa, synthetic construct
  REGION 1..7: note = n-mer motif
ELSTPMV

SEQ ID NO: 6788 - protein, 7 aa, synthetic construct
  REGION 1..7: note = n-mer motif
INISSDF

SEQ ID NO: 6789 - protein, 7 aa, synthetic construct
  REGION 1..7: note = n-mer motif
VTAHQLS

SEQ ID NO: 6790 - protein, 7 aa, synthetic construct
  REGION 1..7: note = n-mer motif
GESSSIS

SEQ ID NO: 6791 - protein, 7 aa, synthetic construct
  REGION 1..7: note = n-mer motif
ESLPISK

SEQ ID NO: 6792 - protein, 7 aa, synthetic construct
  REGION 1..7: note = n-mer motif
TNVSTLL

SEQ ID NO: 6793 - protein, 7 aa, synthetic construct
  REGION 1..7: note = n-mer motif
WQTNGMQ

SEQ ID NO: 6794 - protein, 7 aa, synthetic construct
  REGION 1..7: note = n-mer motif
YRMETNP

SEQ ID NO: 6795 - protein, 7 aa, synthetic construct
  REGION 1..7: note = n-mer motif
ITGNTVG

SEQ ID NO: 6796 - protein, 7 aa, synthetic construct
  REGION 1..7: note = n-mer motif
LNTLIHK

SEQ ID NO: 6797 - protein, 7 aa, synthetic construct
  REGION 1..7: note = n-mer motif
GTSLENR

SEQ ID NO: 6798 - protein, 7 aa, synthetic construct
  REGION 1..7: note = n-mer motif
YQHNQAH

SEQ ID NO: 6799 - protein, 7 aa, synthetic construct
  REGION 1..7: note = n-mer motif
IESKTVQ

SEQ ID NO: 6800 - protein, 7 aa, synthetic construct
  REGION 1..7: note = n-mer motif
YTQGIMN

SEQ ID NO: 6801 - protein, 7 aa, synthetic construct
  REGION 1..7: note = n-mer motif
STNEAPK

SEQ ID NO: 6802 - protein, 7 aa, synthetic construct
  REGION 1..7: note = n-mer motif
LSQNFNP

SEQ ID NO: 6803 - protein, 7 aa, synthetic construct
  REGION 1..7: note = n-mer motif
YSSEMSE

SEQ ID NO: 6804 - protein, 7 aa, synthetic construct
  REGION 1..7: note = n-mer motif
SYGGSGP

SEQ ID NO: 6805 - protein, 7 aa, synthetic construct
  REGION 1..7: note = n-mer motif
MDAAYGS

SEQ ID NO: 6806 - protein, 7 aa, synthetic construct
  REGION 1..7: note = n-mer motif
PFNPGNV

SEQ ID NO: 6807 - protein, 7 aa, synthetic construct
  REGION 1..7: note = n-mer motif
QKSETYT

SEQ ID NO: 6808 - protein, 7 aa, synthetic construct
  REGION 1..7: note = n-mer motif
NKDHNHL

SEQ ID NO: 6809 - protein, 7 aa, synthetic construct
  REGION 1..7: note = n-mer motif
LTGSDMK

SEQ ID NO: 6810 - protein, 7 aa, synthetic construct
  REGION 1..7: note = n-mer motif
SKDSTMY

SEQ ID NO: 6811 - protein, 7 aa, synthetic construct
  REGION 1..7: note = n-mer motif
EAFPRAG

SEQ ID NO: 6812 - protein, 7 aa, synthetic construct
  REGION 1..7: note = n-mer motif
EHTHLNP

SEQ ID NO: 6813 - protein, 7 aa, synthetic construct
  REGION 1..7: note = n-mer motif
SSDPKGQ

SEQ ID NO: 6814 - protein, 7 aa, synthetic construct
  REGION 1..7: note = n-mer motif
KTIDIAQ

SEQ ID NO: 6815 - protein, 7 aa, synthetic construct
  REGION 1..7: note = n-mer motif
TGSLNSM

SEQ ID NO: 6816 - protein, 7 aa, synthetic construct
  REGION 1..7: note = n-mer motif
MQREDAN

SEQ ID NO: 6817 - protein, 7 aa, synthetic construct
  REGION 1..7: note = n-mer motif
ASTVSLY

SEQ ID NO: 6818 - protein, 7 aa, synthetic construct
  REGION 1..7: note = n-mer motif
GRDDLTN

SEQ ID NO: 6819 - protein, 7 aa, synthetic construct
  REGION 1..7: note = n-mer motif
SNPGNHN

SEQ ID NO: 6820 - protein, 7 aa, synthetic construct
  REGION 1..7: note = n-mer motif
DTYKGKW

SEQ ID NO: 6821 - protein, 7 aa, synthetic construct
  REGION 1..7: note = n-mer motif
PPNGSSR

SEQ ID NO: 6822 - protein, 7 aa, synthetic construct
  REGION 1..7: note = n-mer motif
ASYSISD

SEQ ID NO: 6823 - protein, 7 aa, synthetic construct
  REGION 1..7: note = n-mer motif
VTVSLDG

SEQ ID NO: 6824 - protein, 7 aa, synthetic construct
  REGION 1..7: note = n-mer motif
MAIGHSP

SEQ ID NO: 6825 - protein, 7 aa, synthetic construct
  REGION 1..7: note = n-mer motif
FRTVYTG

SEQ ID NO: 6826 - protein, 7 aa, synthetic construct
  REGION 1..7: note = n-mer motif
KKRQPIA

SEQ ID NO: 6827 - protein, 7 aa, synthetic construct
  REGION 1..7: note = n-mer motif
KNKLYYG

SEQ ID NO: 6828 - protein, 7 aa, synthetic construct
  REGION 1..7: note = n-mer motif
STSPVNS

SEQ ID NO: 6829 - protein, 7 aa, synthetic construct
  REGION 1..7: note = n-mer motif
GSGIAGT

SEQ ID NO: 6830 - protein, 7 aa, synthetic construct
  REGION 1..7: note = n-mer motif
IDVLNGS

SEQ ID NO: 6831 - protein, 7 aa, synthetic construct
  REGION 1..7: note = n-mer motif
GHNMAQA

SEQ ID NO: 6832 - protein, 7 aa, synthetic construct
  REGION 1..7: note = n-mer motif
TRSNSDE

SEQ ID NO: 6833 - protein, 7 aa, synthetic construct
  REGION 1..7: note = n-mer motif
GAKGTMG

SEQ ID NO: 6834 - protein, 7 aa, synthetic construct
  REGION 1..7: note = n-mer motif
ATTLTGD

SEQ ID NO: 6835 - protein, 7 aa, synthetic construct
  REGION 1..7: note = n-mer motif
FNTSSEF

SEQ ID NO: 6836 - protein, 7 aa, synthetic construct
  REGION 1..7: note = n-mer motif
YTAQTGW

SEQ ID NO: 6837 - protein, 7 aa, synthetic construct
  REGION 1..7: note = n-mer motif
RVNNDAI

SEQ ID NO: 6838 - protein, 7 aa, synthetic construct
  REGION 1..7: note = n-mer motif
TIQLTDT

SEQ ID NO: 6839 - protein, 7 aa, synthetic construct
  REGION 1..7: note = n-mer motif
ASMPSVD

SEQ ID NO: 6840 - protein, 7 aa, synthetic construct
  REGION 1..7: note = n-mer motif
NQVGASA

SEQ ID NO: 6841 - protein, 7 aa, synthetic construct
  REGION 1..7: note = n-mer motif
GNMVTPN

SEQ ID NO: 6842 - protein, 7 aa, synthetic construct
  REGION 1..7: note = n-mer motif
RGDQGTH

SEQ ID NO: 6843 - protein, 7 aa, synthetic construct
  REGION 1..7: note = n-mer motif
SSDSRIP

SEQ ID NO: 6844 - protein, 7 aa, synthetic construct
  REGION 1..7: note = n-mer motif
GLHGTNA

SEQ ID NO: 6845 - protein, 7 aa, synthetic construct
  REGION 1..7: note = n-mer motif
SSYQSGL

SEQ ID NO: 6846 - protein, 7 aa, synthetic construct
  REGION 1..7: note = n-mer motif
TAYSPTV

SEQ ID NO: 6847 - protein, 7 aa, synthetic construct
  REGION 1..7: note = n-mer motif
RSDTTNA

SEQ ID NO: 6848 - protein, 7 aa, synthetic construct
  REGION 1..7: note = n-mer motif
RIVANEQ

SEQ ID NO: 6849 - protein, 7 aa, synthetic construct
  REGION 1..7: note = n-mer motif
IHNESYV

SEQ ID NO: 6850 - protein, 7 aa, synthetic construct
  REGION 1..7: note = n-mer motif
QQNTRLP

SEQ ID NO: 6851 - protein, 7 aa, synthetic construct
  REGION 1..7: note = n-mer motif
GINSSHF

SEQ ID NO: 6852 - protein, 7 aa, synthetic construct
  REGION 1..7: note = n-mer motif
GMTSNQV

SEQ ID NO: 6853 - protein, 7 aa, synthetic construct
  REGION 1..7: note = n-mer motif
REIVHSN

SEQ ID NO: 6854 - protein, 7 aa, synthetic construct
  REGION 1..7: note = n-mer motif
AEHTYTV

SEQ ID NO: 6855 - protein, 7 aa, synthetic construct
  REGION 1..7: note = n-mer motif
PATLHLT

SEQ ID NO: 6856 - protein, 7 aa, synthetic construct
  REGION 1..7: note = n-mer motif
KQTDSRG

SEQ ID NO: 6857 - protein, 7 aa, synthetic construct
  REGION 1..7: note = n-mer motif
TMVEVLP

SEQ ID NO: 6858 - protein, 7 aa, synthetic construct
  REGION 1..7: note = n-mer motif
IPTGQTS

SEQ ID NO: 6859 - protein, 7 aa, synthetic construct
  REGION 1..7: note = n-mer motif
MIKTNML

SEQ ID NO: 6860 - protein, 7 aa, synthetic construct
  REGION 1..7: note = n-mer motif
AERPTRD

SEQ ID NO: 6861 - protein, 7 aa, synthetic construct
  REGION 1..7: note = n-mer motif
RDLGQTG

SEQ ID NO: 6862 - protein, 7 aa, synthetic construct
  REGION 1..7: note = n-mer motif
NEGRVQT

SEQ ID NO: 6863 - protein, 7 aa, synthetic construct
  REGION 1..7: note = n-mer motif
TAASTAR

SEQ ID NO: 6864 - protein, 7 aa, synthetic construct
  REGION 1..7: note = n-mer motif
TQGNNMV

SEQ ID NO: 6865 - protein, 7 aa, synthetic construct
  REGION 1..7: note = n-mer motif
HSTFPTT

SEQ ID NO: 6866 - protein, 7 aa, synthetic construct
  REGION 1..7: note = n-mer motif
QSIGHPV

SEQ ID NO: 6867 - protein, 7 aa, synthetic construct
  REGION 1..7: note = n-mer motif
SGVNSER

SEQ ID NO: 6868 - protein, 7 aa, synthetic construct
  REGION 1..7: note = n-mer motif
PHANGVT

SEQ ID NO: 6869 - protein, 7 aa, synthetic construct
  REGION 1..7: note = n-mer motif
DHQQALA

SEQ ID NO: 6870 - protein, 7 aa, synthetic construct
  REGION 1..7: note = n-mer motif
SQQGFTL

SEQ ID NO: 6871 - protein, 7 aa, synthetic construct
  REGION 1..7: note = n-mer motif
TNAALVP

SEQ ID NO: 6872 - protein, 7 aa, synthetic construct
  REGION 1..7: note = n-mer motif
GVSSNSA

SEQ ID NO: 6873 - protein, 7 aa, synthetic construct
  REGION 1..7: note = n-mer motif
HDTVGER

SEQ ID NO: 6874 - protein, 7 aa, synthetic construct
  REGION 1..7: note = n-mer motif
ALNAQGI

SEQ ID NO: 6875 - protein, 7 aa, synthetic construct
  REGION 1..7: note = n-mer motif
HDSMCCA

SEQ ID NO: 6876 - protein, 7 aa, synthetic construct
  REGION 1..7: note = n-mer motif
YIAAGEQ

SEQ ID NO: 6877 - protein, 7 aa, synthetic construct
  REGION 1..7: note = n-mer motif
ENAREGV

SEQ ID NO: 6878 - protein, 7 aa, synthetic construct
  REGION 1..7: note = n-mer motif
ATVYNEL

SEQ ID NO: 6879 - protein, 7 aa, synthetic construct
  REGION 1..7: note = n-mer motif
DTNGIKS

SEQ ID NO: 6880 - protein, 7 aa, synthetic construct
  REGION 1..7: note = n-mer motif
KPTANDW

SEQ ID NO: 6881 - protein, 7 aa, synthetic construct
  REGION 1..7: note = n-mer motif
YESTHVN

SEQ ID NO: 6882 - protein, 7 aa, synthetic construct
  REGION 1..7: note = n-mer motif
YTNGGHL

SEQ ID NO: 6883 - protein, 7 aa, synthetic construct
  REGION 1..7: note = n-mer motif
VDKSSPV

SEQ ID NO: 6884 - protein, 7 aa, synthetic construct
  REGION 1..7: note = n-mer motif
PIQNESS

SEQ ID NO: 6885 - protein, 7 aa, synthetic construct
  REGION 1..7: note = n-mer motif
IHKSSVE

SEQ ID NO: 6886 - protein, 7 aa, synthetic construct
  REGION 1..7: note = n-mer motif
HDISLDR

SEQ ID NO: 6887 - protein, 6 aa, synthetic construct
  REGION 1..6: note = n-mer motif
WGAEFA

SEQ ID NO: 6888 - protein, 7 aa, synthetic construct
  REGION 1..7: note = n-mer motif
YSQSIKN

SEQ ID NO: 6889 - protein, 7 aa, synthetic construct
  REGION 1..7: note = n-mer motif
AQDNNHD

SEQ ID NO: 6890 - protein, 7 aa, synthetic construct
  REGION 1..7: note = n-mer motif
GQKETTA

SEQ ID NO: 6891 - protein, 7 aa, synthetic construct
  REGION 1..7: note = n-mer motif
KSEVPAR

SEQ ID NO: 6892 - protein, 7 aa, synthetic construct
  REGION 1..7: note = n-mer motif
ELNTAHA

SEQ ID NO: 6893 - protein, 7 aa, synthetic construct
  REGION 1..7: note = n-mer motif
STNAGQR

SEQ ID NO: 6894 - protein, 7 aa, synthetic construct
  REGION 1..7: note = n-mer motif
KAVSEII

SEQ ID NO: 6895 - protein, 7 aa, synthetic construct
  REGION 1..7: note = n-mer motif
TFTVDGR

SEQ ID NO: 6896 - protein, 7 aa, synthetic construct
  REGION 1..7: note = n-mer motif
STSGYNT

SEQ ID NO: 6897 - protein, 7 aa, synthetic construct
  REGION 1..7: note = n-mer motif
NHSLSEH

SEQ ID NO: 6898 - protein, 7 aa, synthetic construct
  REGION 1..7: note = n-mer motif
SMQDPSL

SEQ ID NO: 6899 - protein, 7 aa, synthetic construct
  REGION 1..7: note = n-mer motif
EQQKTDN

SEQ ID NO: 6900 - protein, 7 aa, synthetic construct
  REGION 1..7: note = n-mer motif
AVVNENM

SEQ ID NO: 6901 - protein, 7 aa, synthetic construct
  REGION 1..7: note = n-mer motif
GPGENYR

SEQ ID NO: 6902 - protein, 7 aa, synthetic construct
  REGION 1..7: note = n-mer motif
YNAGGEQ

SEQ ID NO: 6903 - protein, 7 aa, synthetic construct
  REGION 1..7: note = n-mer motif
VLSSNLY

SEQ ID NO: 6904 - protein, 7 aa, synthetic construct
  REGION 1..7: note = n-mer motif
GLYQNPT

SEQ ID NO: 6905 - protein, 7 aa, synthetic construct
  REGION 1..7: note = n-mer motif
SSGSLIT

SEQ ID NO: 6906 - protein, 7 aa, synthetic construct
  REGION 1..7: note = n-mer motif
YNTDRTN

SEQ ID NO: 6907 - protein, 7 aa, synthetic construct
  REGION 1..7: note = n-mer motif
EKPQHNS

SEQ ID NO: 6908 - protein, 7 aa, synthetic construct
  REGION 1..7: note = n-mer motif
AAYEHAP

SEQ ID NO: 6909 - protein, 7 aa, synthetic construct
  REGION 1..7: note = n-mer motif
GGNYNTT

SEQ ID NO: 6910 - protein, 7 aa, synthetic construct
  REGION 1..7: note = n-mer motif
YLNSTQI

SEQ ID NO: 6911 - protein, 7 aa, synthetic construct
  REGION 1..7: note = n-mer motif
SNSNTAA

SEQ ID NO: 6912 - protein, 7 aa, synthetic construct
  REGION 1..7: note = n-mer motif
SDNRNTA

SEQ ID NO: 6913 - protein, 7 aa, synthetic construct
  REGION 1..7: note = n-mer motif
RSLDSGM

SEQ ID NO: 6914 - protein, 7 aa, synthetic construct
  REGION 1..7: note = n-mer motif
VMDTHGM

SEQ ID NO: 6915 - protein, 7 aa, synthetic construct
  REGION 1..7: note = n-mer motif
HVTAVVD

SEQ ID NO: 6916 - protein, 7 aa, synthetic construct
  REGION 1..7: note = n-mer motif
SITHSNT

SEQ ID NO: 6917 - protein, 7 aa, synthetic construct
  REGION 1..7: note = n-mer motif
GYGSYSN

SEQ ID NO: 6918 - protein, 7 aa, synthetic construct
  REGION 1..7: note = n-mer motif
RWSENNS

SEQ ID NO: 6919 - protein, 7 aa, synthetic construct
  REGION 1..7: note = n-mer motif
MSSHTVQ

SEQ ID NO: 6920 - protein, 7 aa, synthetic construct
  REGION 1..7: note = n-mer motif
YVRAQDQ

SEQ ID NO: 6921 - protein, 7 aa, synthetic construct
  REGION 1..7: note = n-mer motif
FEGDKTY

SEQ ID NO: 6922 - protein, 7 aa, synthetic construct
  REGION 1..7: note = n-mer motif
VSSGHTK

SEQ ID NO: 6923 - protein, 7 aa, synthetic construct
  REGION 1..7: note = n-mer motif
SMNLPTS

SEQ ID NO: 6924 - protein, 7 aa, synthetic construct
  REGION 1..7: note = n-mer motif
LNPQHEL

SEQ ID NO: 6925 - protein, 7 aa, synthetic construct
  REGION 1..7: note = n-mer motif
LPPASAG

SEQ ID NO: 6926 - protein, 7 aa, synthetic construct
  REGION 1..7: note = n-mer motif
GGNSHGV

SEQ ID NO: 6927 - protein, 7 aa, synthetic construct
  REGION 1..7: note = n-mer motif
GGTGLSK

SEQ ID NO: 6928 - protein, 7 aa, synthetic construct
  REGION 1..7: note = n-mer motif
SLNSSST

SEQ ID NO: 6929 - protein, 7 aa, synthetic construct
  REGION 1..7: note = n-mer motif
MPSEPPG

SEQ ID NO: 6930 - protein, 7 aa, synthetic construct
  REGION 1..7: note = n-mer motif
VVHSSIT

SEQ ID NO: 6931 - protein, 7 aa, synthetic construct
  REGION 1..7: note = n-mer motif
LSLAGNR

SEQ ID NO: 6932 - protein, 7 aa, synthetic construct
  REGION 1..7: note = n-mer motif
ADMQHTV

SEQ ID NO: 6933 - protein, 7 aa, synthetic construct
  REGION 1..7: note = n-mer motif
FRDGQGM

SEQ ID NO: 6934 - protein, 7 aa, synthetic construct
  REGION 1..7: note = n-mer motif
TGTAISR

SEQ ID NO: 6935 - protein, 7 aa, synthetic construct
  REGION 1..7: note = n-mer motif
MGKHEGL

SEQ ID NO: 6936 - protein, 7 aa, synthetic construct
  REGION 1..7: note = n-mer motif
PESAAKS

SEQ ID NO: 6937 - protein, 7 aa, synthetic construct
  REGION 1..7: note = n-mer motif
TQAFSLG

SEQ ID NO: 6938 - protein, 7 aa, synthetic construct
  REGION 1..7: note = n-mer motif
TDGIFQP

SEQ ID NO: 6939 - protein, 7 aa, synthetic construct
  REGION 1..7: note = n-mer motif
GSPVIVN

SEQ ID NO: 6940 - protein, 7 aa, synthetic construct
  REGION 1..7: note = n-mer motif
GRDNHHA

SEQ ID NO: 6941 - protein, 7 aa, synthetic construct
  REGION 1..7: note = n-mer motif
PRSITEL

SEQ ID NO: 6942 - protein, 7 aa, synthetic construct
  REGION 1..7: note = n-mer motif
WVNSVGN

SEQ ID NO: 6943 - protein, 7 aa, synthetic construct
  REGION 1..7: note = n-mer motif
VHGTLTY

SEQ ID NO: 6944 - protein, 7 aa, synthetic construct
  REGION 1..7: note = n-mer motif
GVYIDGR

SEQ ID NO: 6945 - protein, 7 aa, synthetic construct
  REGION 1..7: note = n-mer motif
MSNDLPG

SEQ ID NO: 6946 - protein, 7 aa, synthetic construct
  REGION 1..7: note = n-mer motif
NRSDSFA

SEQ ID NO: 6947 - protein, 7 aa, synthetic construct
  REGION 1..7: note = n-mer motif
GQTNAVH

SEQ ID NO: 6948 - protein, 7 aa, synthetic construct
  REGION 1..7: note = n-mer motif
YVDKSMT

SEQ ID NO: 6949 - protein, 7 aa, synthetic construct
  REGION 1..7: note = n-mer motif
SVMVGTN

SEQ ID NO: 6950 - protein, 7 aa, synthetic construct
  REGION 1..7: note = n-mer motif
IGLQNST

SEQ ID NO: 6951 - protein, 7 aa, synthetic construct
  REGION 1..7: note = n-mer motif
NDRPLAS

SEQ ID NO: 6952 - protein, 7 aa, synthetic construct
  REGION 1..7: note = n-mer motif
LMGSPGA

SEQ ID NO: 6953 - protein, 7 aa, synthetic construct
  REGION 1..7: note = n-mer motif
IDRSASL

SEQ ID NO: 6954 - protein, 7 aa, synthetic construct
  REGION 1..7: note = n-mer motif
IQAKNSE

SEQ ID NO: 6955 - protein, 7 aa, synthetic construct
  REGION 1..7: note = n-mer motif
HQSFDAG

SEQ ID NO: 6956 - protein, 7 aa, synthetic construct
  REGION 1..7: note = n-mer motif
AVNETRL

SEQ ID NO: 6957 - protein, 7 aa, synthetic construct
  REGION 1..7: note = n-mer motif
IASTWNM

SEQ ID NO: 6958 - protein, 7 aa, synthetic construct
  REGION 1..7: note = n-mer motif
KVDMTSK

SEQ ID NO: 6959 - protein, 7 aa, synthetic construct
  REGION 1..7: note = n-mer motif
SHSITGL

SEQ ID NO: 6960 - protein, 7 aa, synthetic construct
  REGION 1..7: note = n-mer motif
TITSPSV

SEQ ID NO: 6961 - protein, 7 aa, synthetic construct
  REGION 1..7: note = n-mer motif
EHISSYG

SEQ ID NO: 6962 - protein, 7 aa, synthetic construct
  REGION 1..7: note = n-mer motif
FSTNSVI

SEQ ID NO: 6963 - protein, 7 aa, synthetic construct
  REGION 1..7: note = n-mer motif
SMEGQQH

SEQ ID NO: 6964 - protein, 7 aa, synthetic construct
  REGION 1..7: note = n-mer motif
VDKSEAV

SEQ ID NO: 6965 - protein, 7 aa, synthetic construct
  REGION 1..7: note = n-mer motif
QANLSII

SEQ ID NO: 6966 - protein, 7 aa, synthetic construct
  REGION 1..7: note = n-mer motif
VKASAGV

SEQ ID NO: 6967 - protein, 7 aa, synthetic construct
  REGION 1..7: note = n-mer motif
FGTSYTT

SEQ ID NO: 6968 - protein, 7 aa, synthetic construct
  REGION 1..7: note = n-mer motif
GLTGYPM

SEQ ID NO: 6969 - protein, 7 aa, synthetic construct
  REGION 1..7: note = n-mer motif
AMGALVH

SEQ ID NO: 6970 - protein, 7 aa, synthetic construct
  REGION 1..7: note = n-mer motif
VYATALA

SEQ ID NO: 6971 - protein, 7 aa, synthetic construct
  REGION 1..7: note = n-mer motif
TLTDVHR

SEQ ID NO: 6972 - protein, 7 aa, synthetic construct
  REGION 1..7: note = n-mer motif
PSSAGST

SEQ ID NO: 6973 - protein, 6 aa, synthetic construct
  REGION 1..6: note = n-mer motif
KKRKHL

SEQ ID NO: 6974 - protein, 7 aa, synthetic construct
  REGION 1..7: note = n-mer motif
AYQLTPA

SEQ ID NO: 6975 - protein, 7 aa, synthetic construct
  REGION 1..7: note = n-mer motif
LAPDNIG

SEQ ID NO: 6976 - protein, 7 aa, synthetic construct
  REGION 1..7: note = n-mer motif
TIVSAYA

SEQ ID NO: 6977 - protein, 7 aa, synthetic construct
  REGION 1..7: note = n-mer motif
GNNLSLS

SEQ ID NO: 6978 - protein, 7 aa, synthetic construct
  REGION 1..7: note = n-mer motif
STNTEPR

SEQ ID NO: 6979 - protein, 7 aa, synthetic construct
  REGION 1..7: note = n-mer motif
SFQTDRA

SEQ ID NO: 6980 - protein, 7 aa, synthetic construct
  REGION 1..7: note = n-mer motif
FLEGVAQ

SEQ ID NO: 6981 - protein, 7 aa, synthetic construct
  REGION 1..7: note = n-mer motif
QDVGRTN

SEQ ID NO: 6982 - protein, 7 aa, synthetic construct
  REGION 1..7: note = n-mer motif
THGDHIQ

SEQ ID NO: 6983 - protein, 7 aa, synthetic construct
  REGION 1..7: note = n-mer motif
VSEGQRI

SEQ ID NO: 6984 - protein, 7 aa, synthetic construct
  REGION 1..7: note = n-mer motif
NMGPMGR

SEQ ID NO: 6985 - protein, 7 aa, synthetic construct
  REGION 1..7: note = n-mer motif
LPSTETL

SEQ ID NO: 6986 - protein, 7 aa, synthetic construct
  REGION 1..7: note = n-mer motif
GGMSAHS

SEQ ID NO: 6987 - protein, 7 aa, synthetic construct
  REGION 1..7: note = n-mer motif
GMIGHNA

SEQ ID NO: 6988 - protein, 7 aa, synthetic construct
  REGION 1..7: note = n-mer motif
IDERSSI

SEQ ID NO: 6989 - protein, 7 aa, synthetic construct
  REGION 1..7: note = n-mer motif
HVNPTPA

SEQ ID NO: 6990 - protein, 7 aa, synthetic construct
  REGION 1..7: note = n-mer motif
WSRTGNT

SEQ ID NO: 6991 - protein, 7 aa, synthetic construct
  REGION 1..7: note = n-mer motif
IKDSYLT

SEQ ID NO: 6992 - protein, 7 aa, synthetic construct
  REGION 1..7: note = n-mer motif
LNQNSVS

SEQ ID NO: 6993 - protein, 7 aa, synthetic construct
  REGION 1..7: note = n-mer motif
SGPIPAV

SEQ ID NO: 6994 - protein, 7 aa, synthetic construct
  REGION 1..7: note = n-mer motif
MQGLNNM

SEQ ID NO: 6995 - protein, 7 aa, synthetic construct
  REGION 1..7: note = n-mer motif
SNSGGNH

SEQ ID NO: 6996 - protein, 7 aa, synthetic construct
  REGION 1..7: note = n-mer motif
TSTMTAR

SEQ ID NO: 6997 - protein, 7 aa, synthetic construct
  REGION 1..7: note = n-mer motif
ENSDLSY

SEQ ID NO: 6998 - protein, 7 aa, synthetic construct
  REGION 1..7: note = n-mer motif
HPGNSSV

SEQ ID NO: 6999 - protein, 7 aa, synthetic construct
  REGION 1..7: note = n-mer motif
LTPQGTS

SEQ ID NO: 7000 - protein, 7 aa, synthetic construct
  REGION 1..7: note = n-mer motif
TDTRKND

SEQ ID NO: 7001 - protein, 7 aa, synthetic construct
  REGION 1..7: note = n-mer motif
GETLRSQ

SEQ ID NO: 7002 - protein, 7 aa, synthetic construct
  REGION 1..7: note = n-mer motif
SGVSEGN

SEQ ID NO: 7003 - protein, 7 aa, synthetic construct
  REGION 1..7: note = n-mer motif
TQYGTLP

SEQ ID NO: 7004 - protein, 7 aa, synthetic construct
  REGION 1..7: note = n-mer motif
GTVNSSA

SEQ ID NO: 7005 - protein, 7 aa, synthetic construct
  REGION 1..7: note = n-mer motif
GKATLVL

SEQ ID NO: 7006 - protein, 7 aa, synthetic construct
  REGION 1..7: note = n-mer motif
GIYPAST

SEQ ID NO: 7007 - protein, 7 aa, synthetic construct
  REGION 1..7: note = n-mer motif
GVMSNAT

SEQ ID NO: 7008 - protein, 7 aa, synthetic construct
  REGION 1..7: note = n-mer motif
THVIGAV

SEQ ID NO: 7009 - protein, 7 aa, synthetic construct
  REGION 1..7: note = n-mer motif
TRSDIGV

SEQ ID NO: 7010 - protein, 7 aa, synthetic construct
  REGION 1..7: note = n-mer motif
TLTLSTL

SEQ ID NO: 7011 - protein, 7 aa, synthetic construct
  REGION 1..7: note = n-mer motif
YNESSNA

SEQ ID NO: 7012 - protein, 7 aa, synthetic construct
  REGION 1..7: note = n-mer motif
STQAQTG

SEQ ID NO: 7013 - protein, 7 aa, synthetic construct
  REGION 1..7: note = n-mer motif
RDMINSS

SEQ ID NO: 7014 - protein, 7 aa, synthetic construct
  REGION 1..7: note = n-mer motif
TKGNNLV

SEQ ID NO: 7015 - protein, 7 aa, synthetic construct
  REGION 1..7: note = n-mer motif
GSTVSAQ

SEQ ID NO: 7016 - protein, 7 aa, synthetic construct
  REGION 1..7: note = n-mer motif
RGDTMNY

SEQ ID NO: 7017 - protein, 7 aa, synthetic construct
  REGION 1..7: note = n-mer motif
HADVNAG

SEQ ID NO: 7018 - protein, 7 aa, synthetic construct
  REGION 1..7: note = n-mer motif
SVVNTNI

SEQ ID NO: 7019 - protein, 7 aa, synthetic construct
  REGION 1..7: note = n-mer motif
SNVHVVN

SEQ ID NO: 7020 - protein, 7 aa, synthetic construct
  REGION 1..7: note = n-mer motif
SVDKPPG

SEQ ID NO: 7021 - protein, 7 aa, synthetic construct
  REGION 1..7: note = n-mer motif
DRTYSNT

SEQ ID NO: 7022 - protein, 7 aa, synthetic construct
  REGION 1..7: note = n-mer motif
YSGELNK

SEQ ID NO: 7023 - protein, 7 aa, synthetic construct
  REGION 1..7: note = n-mer motif
YDKTLSV

SEQ ID NO: 7024 - protein, 7 aa, synthetic construct
  REGION 1..7: note = n-mer motif
HTATLSS

SEQ ID NO: 7025 - protein, 7 aa, synthetic construct
  REGION 1..7: note = n-mer motif
ALERAQY

SEQ ID NO: 7026 - protein, 7 aa, synthetic construct
  REGION 1..7: note = n-mer motif
GTSDNYR

SEQ ID NO: 7027 - protein, 7 aa, synthetic construct
  REGION 1..7: note = n-mer motif
HVNSRDL

SEQ ID NO: 7028 - protein, 7 aa, synthetic construct
  REGION 1..7: note = n-mer motif
SSDVTRQ

SEQ ID NO: 7029 - protein, 7 aa, synthetic construct
  REGION 1..7: note = n-mer motif
AHHMTTE

SEQ ID NO: 7030 - protein, 7 aa, synthetic construct
  REGION 1..7: note = n-mer motif
EVSRDGL

SEQ ID NO: 7031 - protein, 7 aa, synthetic construct
  REGION 1..7: note = n-mer motif
VGRDAEA

SEQ ID NO: 7032 - protein, 7 aa, synthetic construct
  REGION 1..7: note = n-mer motif
AHQKDLR

SEQ ID NO: 7033 - protein, 7 aa, synthetic construct
  REGION 1..7: note = n-mer motif
SVLSSST

SEQ ID NO: 7034 - protein, 7 aa, synthetic construct
  REGION 1..7: note = n-mer motif
LGTLLSQ

SEQ ID NO: 7035 - protein, 7 aa, synthetic construct
  REGION 1..7: note = n-mer motif
SQKPIDD

SEQ ID NO: 7036 - protein, 7 aa, synthetic construct
  REGION 1..7: note = n-mer motif
DNVHGQV

SEQ ID NO: 7037 - protein, 7 aa, synthetic construct
  REGION 1..7: note = n-mer motif
GSHNGPT

SEQ ID NO: 7038 - protein, 7 aa, synthetic construct
  REGION 1..7: note = n-mer motif
ISGSSSL

SEQ ID NO: 7039 - protein, 7 aa, synthetic construct
  REGION 1..7: note = n-mer motif
GFHINGE

SEQ ID NO: 7040 - protein, 7 aa, synthetic construct
  REGION 1..7: note = n-mer motif
MSDGHSK

SEQ ID NO: 7041 - protein, 7 aa, synthetic construct
  REGION 1..7: note = n-mer motif
TVGGNHH

SEQ ID NO: 7042 - protein, 7 aa, synthetic construct
  REGION 1..7: note = n-mer motif
NATPPNH

SEQ ID NO: 7043 - protein, 7 aa, synthetic construct
  REGION 1..7: note = n-mer motif
TGMNSNK

SEQ ID NO: 7044 - protein, 7 aa, synthetic construct
  REGION 1..7: note = n-mer motif
IEAYSRD

SEQ ID NO: 7045 - protein, 7 aa, synthetic construct
  REGION 1..7: note = n-mer motif
RDRQDSV

SEQ ID NO: 7046 - protein, 7 aa, synthetic construct
  REGION 1..7: note = n-mer motif
HTVQIRE

SEQ ID NO: 7047 - protein, 7 aa, synthetic construct
  REGION 1..7: note = n-mer motif
TLTQTGM

SEQ ID NO: 7048 - protein, 7 aa, synthetic construct
  REGION 1..7: note = n-mer motif
INNFNTL

SEQ ID NO: 7049 - protein, 7 aa, synthetic construct
  REGION 1..7: note = n-mer motif
VAAGPEA

SEQ ID NO: 7050 - protein, 7 aa, synthetic construct
  REGION 1..7: note = n-mer motif
DGKNSYA

SEQ ID NO: 7051 - protein, 7 aa, synthetic construct
  REGION 1..7: note = n-mer motif
SRQENFS

SEQ ID NO: 7052 - protein, 7 aa, synthetic construct
  REGION 1..7: note = n-mer motif
SNSSVAV

SEQ ID NO: 7053 - protein, 7 aa, synthetic construct
  REGION 1..7: note = n-mer motif
DHSKQSS

SEQ ID NO: 7054 - protein, 7 aa, synthetic construct
  REGION 1..7: note = n-mer motif
LSGAGSQ

SEQ ID NO: 7055 - protein, 7 aa, synthetic construct
  REGION 1..7: note = n-mer motif
GWSNNEL

SEQ ID NO: 7056 - protein, 7 aa, synthetic construct
  REGION 1..7: note = n-mer motif
LIRGSME

SEQ ID NO: 7057 - protein, 7 aa, synthetic construct
  REGION 1..7: note = n-mer motif
NTYTAGK

SEQ ID NO: 7058 - protein, 7 aa, synthetic construct
  REGION 1..7: note = n-mer motif
TRGDMEF

SEQ ID NO: 7059 - protein, 7 aa, synthetic construct
  REGION 1..7: note = n-mer motif
LMSGKEN

SEQ ID NO: 7060 - protein, 7 aa, synthetic construct
  REGION 1..7: note = n-mer motif
KDTNQQI

SEQ ID NO: 7061 - protein, 7 aa, synthetic construct
  REGION 1..7: note = n-mer motif
HNVGLGH

SEQ ID NO: 7062 - protein, 7 aa, synthetic construct
  REGION 1..7: note = n-mer motif
PDQPGPS

SEQ ID NO: 7063 - protein, 7 aa, synthetic construct
  REGION 1..7: note = n-mer motif
MQREAAN

SEQ ID NO: 7064 - protein, 7 aa, synthetic construct
  REGION 1..7: note = n-mer motif
GQRTTND

SEQ ID NO: 7065 - protein, 7 aa, synthetic construct
  REGION 1..7: note = n-mer motif
KHTENGT

SEQ ID NO: 7066 - protein, 7 aa, synthetic construct
  REGION 1..7: note = n-mer motif
LDVTRMR

SEQ ID NO: 7067 - protein, 7 aa, synthetic construct
  REGION 1..7: note = n-mer motif
TLDRNQT

SEQ ID NO: 7068 - protein, 7 aa, synthetic construct
  REGION 1..7: note = n-mer motif
INAGNYR

SEQ ID NO: 7069 - protein, 7 aa, synthetic construct
  REGION 1..7: note = n-mer motif
AVDQSRL

SEQ ID NO: 7070 - protein, 7 aa, synthetic construct
  REGION 1..7: note = n-mer motif
ALGHQGN

SEQ ID NO: 7071 - protein, 7 aa, synthetic construct
  REGION 1..7: note = n-mer motif
LPRHDQY

SEQ ID NO: 7072 - protein, 7 aa, synthetic construct
  REGION 1..7: note = n-mer motif
ISGSSSL

SEQ ID NO: 7073 - protein, 7 aa, synthetic construct
  REGION 1..7: note = n-mer motif
WNTNMAI

SEQ ID NO: 7074 - protein, 7 aa, synthetic construct
  REGION 1..7: note = n-mer motif
MSDRTSD

SEQ ID NO: 7075 - protein, 7 aa, synthetic construct
  REGION 1..7: note = n-mer motif
TRESMSI

SEQ ID NO: 7076 - protein, 7 aa, synthetic construct
  REGION 1..7: note = n-mer motif
QRGELPA

SEQ ID NO: 7077 - protein, 7 aa, synthetic construct
  REGION 1..7: note = n-mer motif
SSDPKGQ

SEQ ID NO: 7078 - protein, 7 aa, synthetic construct
  REGION 1..7: note = n-mer motif
PSDRTTY

SEQ ID NO: 7079 - protein, 7 aa, synthetic construct
  REGION 1..7: note = n-mer motif
SSSDSPR

SEQ ID NO: 7080 - protein, 7 aa, synthetic construct
  REGION 1..7: note = n-mer motif
VLHSVSA

SEQ ID NO: 7081 - protein, 7 aa, synthetic construct
  REGION 1..7: note = n-mer motif
SMQSYTM

SEQ ID NO: 7082 - protein, 7 aa, synthetic construct
  REGION 1..7: note = n-mer motif
SLQLTAG

SEQ ID NO: 7083 - protein, 7 aa, synthetic construct
  REGION 1..7: note = n-mer motif
NNVNPYS

SEQ ID NO: 7084 - protein, 7 aa, synthetic construct
  REGION 1..7: note = n-mer motif
LANGMTA

SEQ ID NO: 7085 - protein, 7 aa, synthetic construct
  REGION 1..7: note = n-mer motif
GITGSTG

SEQ ID NO: 7086 - protein, 7 aa, synthetic construct
  REGION 1..7: note = n-mer motif
MLVQNTP

SEQ ID NO: 7087 - protein, 7 aa, synthetic construct
  REGION 1..7: note = n-mer motif
DANAGTR

SEQ ID NO: 7088 - protein, 7 aa, synthetic construct
  REGION 1..7: note = n-mer motif
ETGAMTS

SEQ ID NO: 7089 - protein, 7 aa, synthetic construct
  REGION 1..7: note = n-mer motif
IQTTTKC

SEQ ID NO: 7090 - protein, 7 aa, synthetic construct
  REGION 1..7: note = n-mer motif
AQQSLHG

SEQ ID NO: 7091 - protein, 7 aa, synthetic construct
  REGION 1..7: note = n-mer motif
IDSTWNT

SEQ ID NO: 7092 - protein, 7 aa, synthetic construct
  REGION 1..7: note = n-mer motif
TESQTMR

SEQ ID NO: 7093 - protein, 7 aa, synthetic construct
  REGION 1..7: note = n-mer motif
LIQTQGT

SEQ ID NO: 7094 - protein, 7 aa, synthetic construct
  REGION 1..7: note = n-mer motif
IVNITQS

SEQ ID NO: 7095 - protein, 7 aa, synthetic construct
  REGION 1..7: note = n-mer motif
VAVSNTP

SEQ ID NO: 7096 - protein, 7 aa, synthetic construct
  REGION 1..7: note = n-mer motif
GHRDSGG

SEQ ID NO: 7097 - protein, 7 aa, synthetic construct
  REGION 1..7: note = n-mer motif
RNENLNN

SEQ ID NO: 7098 - protein, 7 aa, synthetic construct
  REGION 1..7: note = n-mer motif
VMQRSAQ

SEQ ID NO: 7099 - protein, 7 aa, synthetic construct
  REGION 1..7: note = n-mer motif
VSGPVSV

SEQ ID NO: 7100 - protein, 7 aa, synthetic construct
  REGION 1..7: note = n-mer motif
GDIQSHS

SEQ ID NO: 7101 - protein, 7 aa, synthetic construct
  REGION 1..7: note = n-mer motif
VEKPLET

SEQ ID NO: 7102 - protein, 7 aa, synthetic construct
  REGION 1..7: note = n-mer motif
GVQMTAG

SEQ ID NO: 7103 - protein, 7 aa, synthetic construct
  REGION 1..7: note = n-mer motif
TTKTTSM

SEQ ID NO: 7104 - protein, 7 aa, synthetic construct
  REGION 1..7: note = n-mer motif
PGNPSSN

SEQ ID NO: 7105 - protein, 7 aa, synthetic construct
  REGION 1..7: note = n-mer motif
ASRPAAQ

SEQ ID NO: 7106 - protein, 7 aa, synthetic construct
  REGION 1..7: note = n-mer motif
VHDQGAG

SEQ ID NO: 7107 - protein, 7 aa, synthetic construct
  REGION 1..7: note = n-mer motif
SGSEYRT

SEQ ID NO: 7108 - protein, 7 aa, synthetic construct
  REGION 1..7: note = n-mer motif
YVDDNSR

SEQ ID NO: 7109 - protein, 7 aa, synthetic construct
  REGION 1..7: note = n-mer motif
MAGDQEL

SEQ ID NO: 7110 - protein, 7 aa, synthetic construct
  REGION 1..7: note = n-mer motif
PLHNIPP

SEQ ID NO: 7111 - protein, 7 aa, synthetic construct
  REGION 1..7: note = n-mer motif
SGIGTYS

SEQ ID NO: 7112 - protein, 7 aa, synthetic construct
  REGION 1..7: note = n-mer motif
SNADILA

SEQ ID NO: 7113 - protein, 7 aa, synthetic construct
  REGION 1..7: note = n-mer motif
SHNQVNV

SEQ ID NO: 7114 - protein, 7 aa, synthetic construct
  REGION 1..7: note = n-mer motif
QHSPKPV

SEQ ID NO: 7115 - protein, 7 aa, synthetic construct
  REGION 1..7: note = n-mer motif
SANNIAP

SEQ ID NO: 7116 - protein, 7 aa, synthetic construct
  REGION 1..7: note = n-mer motif
EETRTRM

SEQ ID NO: 7117 - protein, 7 aa, synthetic construct
  REGION 1..7: note = n-mer motif
LSNSITP

SEQ ID NO: 7118 - protein, 7 aa, synthetic construct
  REGION 1..7: note = n-mer motif
SALNSVD

SEQ ID NO: 7119 - protein, 7 aa, synthetic construct
  REGION 1..7: note = n-mer motif
TNLAVTL

SEQ ID NO: 7120 - protein, 7 aa, synthetic construct
  REGION 1..7: note = n-mer motif
QSTLNRP

SEQ ID NO: 7121 - protein, 7 aa, synthetic construct
  REGION 1..7: note = n-mer motif
IEHMLRP

SEQ ID NO: 7122 - protein, 7 aa, synthetic construct
  REGION 1..7: note = n-mer motif
PTPNEHM

SEQ ID NO: 7123 - protein, 7 aa, synthetic construct
  REGION 1..7: note = n-mer motif
INEIGRM

SEQ ID NO: 7124 - protein, 7 aa, synthetic construct
  REGION 1..7: note = n-mer motif
NNDNVYV

SEQ ID NO: 7125 - protein, 7 aa, synthetic construct
  REGION 1..7: note = n-mer motif
IVHTPQV

SEQ ID NO: 7126 - protein, 7 aa, synthetic construct
  REGION 1..7: note = n-mer motif
HKSESHN

SEQ ID NO: 7127 - protein, 7 aa, synthetic construct
  REGION 1..7: note = n-mer motif
SSSDSPR

SEQ ID NO: 7128 - protein, 7 aa, synthetic construct
  REGION 1..7: note = n-mer motif
YSTEARV

SEQ ID NO: 7129 - protein, 7 aa, synthetic construct
  REGION 1..7: note = n-mer motif
TSGDRYT

SEQ ID NO: 7130 - protein, 7 aa, synthetic construct
  REGION 1..7: note = n-mer motif
EKNLTNA

SEQ ID NO: 7131 - protein, 7 aa, synthetic construct
  REGION 1..7: note = n-mer motif
TRDQRST

SEQ ID NO: 7132 - protein, 7 aa, synthetic construct
  REGION 1..7: note = n-mer motif
ATDKMTP

SEQ ID NO: 7133 - protein, 7 aa, synthetic construct
  REGION 1..7: note = n-mer motif
NSYTAGK

SEQ ID NO: 7134 - protein, 7 aa, synthetic construct
  REGION 1..7: note = n-mer motif
TLDTKDL

SEQ ID NO: 7135 - protein, 7 aa, synthetic construct
  REGION 1..7: note = n-mer motif
ASNGQVN

SEQ ID NO: 7136 - protein, 7 aa, synthetic construct
  REGION 1..7: note = n-mer motif
TSISSQS

SEQ ID NO: 7137 - protein, 7 aa, synthetic construct
  REGION 1..7: note = n-mer motif
DNSPANH

SEQ ID NO: 7138 - protein, 7 aa, synthetic construct
  REGION 1..7: note = n-mer motif
NSREMGV

SEQ ID NO: 7139 - protein, 7 aa, synthetic construct
  REGION 1..7: note = n-mer motif
TSASENW

SEQ ID NO: 7140 - protein, 7 aa, synthetic construct
  REGION 1..7: note = n-mer motif
TVGSSYA

SEQ ID NO: 7141 - protein, 7 aa, synthetic construct
  REGION 1..7: note = n-mer motif
QQSQNSI

SEQ ID NO: 7142 - protein, 7 aa, synthetic construct
  REGION 1..7: note = n-mer motif
LRDGIAS

SEQ ID NO: 7143 - protein, 7 aa, synthetic construct
  REGION 1..7: note = n-mer motif
VQKTTAW

SEQ ID NO: 7144 - protein, 7 aa, synthetic construct
  REGION 1..7: note = n-mer motif
MSTVLRE

SEQ ID NO: 7145 - protein, 7 aa, synthetic construct
  REGION 1..7: note = n-mer motif
SMDARLT

SEQ ID NO: 7146 - protein, 7 aa, synthetic construct
  REGION 1..7: note = n-mer motif
GARTILD

SEQ ID NO: 7147 - protein, 7 aa, synthetic construct
  REGION 1..7: note = n-mer motif
HESHYVS

SEQ ID NO: 7148 - protein, 7 aa, synthetic construct
  REGION 1..7: note = n-mer motif
LEGQNKT

SEQ ID NO: 7149 - protein, 7 aa, synthetic construct
  REGION 1..7: note = n-mer motif
RDLRPVT

SEQ ID NO: 7150 - protein, 7 aa, synthetic construct
  REGION 1..7: note = n-mer motif
QILNYSV

SEQ ID NO: 7151 - protein, 7 aa, synthetic construct
  REGION 1..7: note = n-mer motif
ISVGVSV

SEQ ID NO: 7152 - protein, 7 aa, synthetic construct
  REGION 1..7: note = n-mer motif
KAGEYRD

SEQ ID NO: 7153 - protein, 7 aa, synthetic construct
  REGION 1..7: note = n-mer motif
LTTNGML

SEQ ID NO: 7154 - protein, 7 aa, synthetic construct
  REGION 1..7: note = n-mer motif
TSNYMHE

SEQ ID NO: 7155 - protein, 7 aa, synthetic construct
  REGION 1..7: note = n-mer motif
THNSTGL

SEQ ID NO: 7156 - protein, 7 aa, synthetic construct
  REGION 1..7: note = n-mer motif
NNVVRDD

SEQ ID NO: 7157 - protein, 7 aa, synthetic construct
  REGION 1..7: note = n-mer motif
SGTYASR

SEQ ID NO: 7158 - protein, 7 aa, synthetic construct
  REGION 1..7: note = n-mer motif
LSHAMDR

SEQ ID NO: 7159 - protein, 7 aa, synthetic construct
  REGION 1..7: note = n-mer motif
NWNSEGT

SEQ ID NO: 7160 - protein, 7 aa, synthetic construct
  REGION 1..7: note = n-mer motif
SLRPTLP

SEQ ID NO: 7161 - protein, 7 aa, synthetic construct
  REGION 1..7: note = n-mer motif
YQTGDKD

SEQ ID NO: 7162 - protein, 7 aa, synthetic construct
  REGION 1..7: note = n-mer motif
RSDKGTL

SEQ ID NO: 7163 - protein, 7 aa, synthetic construct
  REGION 1..7: note = n-mer motif
STIGNST

SEQ ID NO: 7164 - protein, 7 aa, synthetic construct
  REGION 1..7: note = n-mer motif
ENNMQHG

SEQ ID NO: 7165 - protein, 7 aa, synthetic construct
  REGION 1..7: note = n-mer motif
KYTESNA

SEQ ID NO: 7166 - protein, 7 aa, synthetic construct
  REGION 1..7: note = n-mer motif
PTNNLSM

SEQ ID NO: 7167 - protein, 7 aa, synthetic construct
  REGION 1..7: note = n-mer motif
CKNNSEC

SEQ ID NO: 7168 - protein, 7 aa, synthetic construct
  REGION 1..7: note = n-mer motif
TVNADGS

SEQ ID NO: 7169 - protein, 7 aa, synthetic construct
  REGION 1..7: note = n-mer motif
FSGQALA

SEQ ID NO: 7170 - protein, 7 aa, synthetic construct
  REGION 1..7: note = n-mer motif
NHIRNPM

SEQ ID NO: 7171 - protein, 7 aa, synthetic construct
  REGION 1..7: note = n-mer motif
MVNSENT

SEQ ID NO: 7172 - protein, 7 aa, synthetic construct
  REGION 1..7: note = n-mer motif
TDGPRLA

SEQ ID NO: 7173 - protein, 7 aa, synthetic construct
  REGION 1..7: note = n-mer motif
FNGYVMA

SEQ ID NO: 7174 - protein, 7 aa, synthetic construct
  REGION 1..7: note = n-mer motif
NANGPVS

SEQ ID NO: 7175 - protein, 7 aa, synthetic construct
  REGION 1..7: note = n-mer motif
STSQENR

SEQ ID NO: 7176 - protein, 7 aa, synthetic construct
  REGION 1..7: note = n-mer motif
QGTLLSP

SEQ ID NO: 7177 - protein, 7 aa, synthetic construct
  REGION 1..7: note = n-mer motif
LITATTN

SEQ ID NO: 7178 - protein, 7 aa, synthetic construct
  REGION 1..7: note = n-mer motif
SGVSKER

SEQ ID NO: 7179 - protein, 7 aa, synthetic construct
  REGION 1..7: note = n-mer motif
STSIGVV

SEQ ID NO: 7180 - protein, 7 aa, synthetic construct
  REGION 1..7: note = n-mer motif
SHVTVTD

SEQ ID NO: 7181 - protein, 7 aa, synthetic construct
  REGION 1..7: note = n-mer motif
SNNLNQE

SEQ ID NO: 7182 - protein, 7 aa, synthetic construct
  REGION 1..7: note = n-mer motif
ANHDNIV

SEQ ID NO: 7183 - protein, 7 aa, synthetic construct
  REGION 1..7: note = n-mer motif
DTSSGNR

SEQ ID NO: 7184 - protein, 7 aa, synthetic construct
  REGION 1..7: note = n-mer motif
VVPMPTT

SEQ ID NO: 7185 - protein, 7 aa, synthetic construct
  REGION 1..7: note = n-mer motif
LTNNFKD

SEQ ID NO: 7186 - protein, 7 aa, synthetic construct
  REGION 1..7: note = n-mer motif
SSPTKGT

SEQ ID NO: 7187 - protein, 7 aa, synthetic construct
  REGION 1..7: note = n-mer motif
DIPSDNT

SEQ ID NO: 7188 - protein, 7 aa, synthetic construct
  REGION 1..7: note = n-mer motif
YTGFELR

SEQ ID NO: 7189 - protein, 7 aa, synthetic construct
  REGION 1..7: note = n-mer motif
NSGNNPI

SEQ ID NO: 7190 - protein, 7 aa, synthetic construct
  REGION 1..7: note = n-mer motif
TTRNEHS

SEQ ID NO: 7191 - protein, 7 aa, synthetic construct
  REGION 1..7: note = n-mer motif
NVGNTLG

SEQ ID NO: 7192 - protein, 7 aa, synthetic construct
  REGION 1..7: note = n-mer motif
YHTHQVA

SEQ ID NO: 7193 - protein, 7 aa, synthetic construct
  REGION 1..7: note = n-mer motif
GSASNSG

SEQ ID NO: 7194 - protein, 7 aa, synthetic construct
  REGION 1..7: note = n-mer motif
GKNQPTP

SEQ ID NO: 7195 - protein, 7 aa, synthetic construct
  REGION 1..7: note = n-mer motif
FTATLGT

SEQ ID NO: 7196 - protein, 7 aa, synthetic construct
  REGION 1..7: note = n-mer motif
MNQMGGL

SEQ ID NO: 7197 - protein, 7 aa, synthetic construct
  REGION 1..7: note = n-mer motif
NVSLTQT

SEQ ID NO: 7198 - protein, 7 aa, synthetic construct
  REGION 1..7: note = n-mer motif
SSSNTNA

SEQ ID NO: 7199 - protein, 7 aa, synthetic construct
  REGION 1..7: note = n-mer motif
TNSNQSS

SEQ ID NO: 7200 - protein, 7 aa, synthetic construct
  REGION 1..7: note = n-mer motif
ISHDLKY

SEQ ID NO: 7201 - protein, 7 aa, synthetic construct
  REGION 1..7: note = n-mer motif
DSTYVLA

SEQ ID NO: 7202 - protein, 7 aa, synthetic construct
  REGION 1..7: note = n-mer motif
MNTGSSS

SEQ ID NO: 7203 - protein, 7 aa, synthetic construct
  REGION 1..7: note = n-mer motif
AGNYQSS

SEQ ID NO: 7204 - protein, 7 aa, synthetic construct
  REGION 1..7: note = n-mer motif
TIYNMGP

SEQ ID NO: 7205 - protein, 7 aa, synthetic construct
  REGION 1..7: note = n-mer motif
VSTTTDR

SEQ ID NO: 7206 - protein, 7 aa, synthetic construct
  REGION 1..7: note = n-mer motif
GVTVREL

SEQ ID NO: 7207 - protein, 7 aa, synthetic construct
  REGION 1..7: note = n-mer motif
DITNQSY

SEQ ID NO: 7208 - protein, 7 aa, synthetic construct
  REGION 1..7: note = n-mer motif
NQSLTMD

SEQ ID NO: 7209 - protein, 7 aa, synthetic construct
  REGION 1..7: note = n-mer motif
TNYNIGP

SEQ ID NO: 7210 - protein, 7 aa, synthetic construct
  REGION 1..7: note = n-mer motif
RGTEGTP

SEQ ID NO: 7211 - protein, 7 aa, synthetic construct
  REGION 1..7: note = n-mer motif
PITRESG

SEQ ID NO: 7212 - protein, 7 aa, synthetic construct
  REGION 1..7: note = n-mer motif
TGQAGGS

SEQ ID NO: 7213 - protein, 7 aa, synthetic construct
  REGION 1..7: note = n-mer motif
MTKHDAT

SEQ ID NO: 7214 - protein, 7 aa, synthetic construct
  REGION 1..7: note = n-mer motif
PIPHGSS

SEQ ID NO: 7215 - protein, 7 aa, synthetic construct
  REGION 1..7: note = n-mer motif
TTGGTGM

SEQ ID NO: 7216 - protein, 7 aa, synthetic construct
  REGION 1..7: note = n-mer motif
LTESVRN

SEQ ID NO: 7217 - protein, 7 aa, synthetic construct
  REGION 1..7: note = n-mer motif
SSNLTLS

SEQ ID NO: 7218 - protein, 7 aa, synthetic construct
  REGION 1..7: note = n-mer motif
LNNSATV

SEQ ID NO: 7219 - protein, 7 aa, synthetic construct
  REGION 1..7: note = n-mer motif
AYGSSGR

SEQ ID NO: 7220 - protein, 7 aa, synthetic construct
  REGION 1..7: note = n-mer motif
VSYDNGS

SEQ ID NO: 7221 - protein, 7 aa, synthetic construct
  REGION 1..7: note = n-mer motif
PSQSRSL

SEQ ID NO: 7222 - protein, 7 aa, synthetic construct
  REGION 1..7: note = n-mer motif
VLVNVHN

SEQ ID NO: 7223 - protein, 7 aa, synthetic construct
  REGION 1..7: note = n-mer motif
LMTGTAS

SEQ ID NO: 7224 - protein, 7 aa, synthetic construct
  REGION 1..7: note = n-mer motif
AAGNPTR

SEQ ID NO: 7225 - protein, 7 aa, synthetic construct
  REGION 1..7: note = n-mer motif
SAQSFVV

SEQ ID NO: 7226 - protein, 7 aa, synthetic construct
  REGION 1..7: note = n-mer motif
QDQTSNR

SEQ ID NO: 7227 - protein, 7 aa, synthetic construct
  REGION 1..7: note = n-mer motif
QSIGHPV

SEQ ID NO: 7228 - protein, 7 aa, synthetic construct
  REGION 1..7: note = n-mer motif
AGVRESF

SEQ ID NO: 7229 - protein, 7 aa, synthetic construct
  REGION 1..7: note = n-mer motif
NTNYAMH

SEQ ID NO: 7230 - protein, 7 aa, synthetic construct
  REGION 1..7: note = n-mer motif
ERSTHNV

SEQ ID NO: 7231 - protein, 7 aa, synthetic construct
  REGION 1..7: note = n-mer motif
MSGSMIS

SEQ ID NO: 7232 - protein, 7 aa, synthetic construct
  REGION 1..7: note = n-mer motif
SGQGFSA

SEQ ID NO: 7233 - protein, 7 aa, synthetic construct
  REGION 1..7: note = n-mer motif
TFTTLGK

SEQ ID NO: 7234 - protein, 7 aa, synthetic construct
  REGION 1..7: note = n-mer motif
DANAGTR

SEQ ID NO: 7235 - protein, 7 aa, synthetic construct
  REGION 1..7: note = n-mer motif
RDTAKGV

SEQ ID NO: 7236 - protein, 7 aa, synthetic construct
  REGION 1..7: note = n-mer motif
VRSGNKP

SEQ ID NO: 7237 - protein, 7 aa, synthetic construct
  REGION 1..7: note = n-mer motif
PQWGTDP

SEQ ID NO: 7238 - protein, 7 aa, synthetic construct
  REGION 1..7: note = n-mer motif
AFQNTGA

SEQ ID NO: 7239 - protein, 7 aa, synthetic construct
  REGION 1..7: note = n-mer motif
ATTQLMT

SEQ ID NO: 7240 - protein, 7 aa, synthetic construct
  REGION 1..7: note = n-mer motif
TNASEGS

SEQ ID NO: 7241 - protein, 7 aa, synthetic construct
  REGION 1..7: note = n-mer motif
MLTETKA

SEQ ID NO: 7242 - protein, 7 aa, synthetic construct
  REGION 1..7: note = n-mer motif
TNNLLAQ

SEQ ID NO: 7243 - protein, 7 aa, synthetic construct
  REGION 1..7: note = n-mer motif
DVLLKNF

SEQ ID NO: 7244 - protein, 7 aa, synthetic construct
  REGION 1..7: note = n-mer motif
YTPGLTE

SEQ ID NO: 7245 - protein, 7 aa, synthetic construct
  REGION 1..7: note = n-mer motif
RHASDAN

SEQ ID NO: 7246 - protein, 7 aa, synthetic construct
  REGION 1..7: note = n-mer motif
SKGDQLN

SEQ ID NO: 7247 - protein, 7 aa, synthetic construct
  REGION 1..7: note = n-mer motif
VLVTQNH

SEQ ID NO: 7248 - protein, 7 aa, synthetic construct
  REGION 1..7: note = n-mer motif
RQGDLKE

SEQ ID NO: 7249 - protein, 7 aa, synthetic construct
  REGION 1..7: note = n-mer motif
IQSQSQL

SEQ ID NO: 7250 - protein, 7 aa, synthetic construct
  REGION 1..7: note = n-mer motif
KIESGTI

SEQ ID NO: 7251 - protein, 7 aa, synthetic construct
  REGION 1..7: note = n-mer motif
TTLSQQS

SEQ ID NO: 7252 - protein, 7 aa, synthetic construct
  REGION 1..7: note = n-mer motif
FQLASNP

SEQ ID NO: 7253 - protein, 7 aa, synthetic construct
  REGION 1..7: note = n-mer motif
WISTEMR

SEQ ID NO: 7254 - protein, 7 aa, synthetic construct
  REGION 1..7: note = n-mer motif
AITITQK

SEQ ID NO: 7255 - protein, 7 aa, synthetic construct
  REGION 1..7: note = n-mer motif
VTGVDYA

SEQ ID NO: 7256 - protein, 7 aa, synthetic construct
  REGION 1..7: note = n-mer motif
IIASSTT

SEQ ID NO: 7257 - protein, 7 aa, synthetic construct
  REGION 1..7: note = n-mer motif
IYTNSHV

SEQ ID NO: 7258 - protein, 7 aa, synthetic construct
  REGION 1..7: note = n-mer motif
NDIPTRA

SEQ ID NO: 7259 - protein, 7 aa, synthetic construct
  REGION 1..7: note = n-mer motif
GVTNASK

SEQ ID NO: 7260 - protein, 7 aa, synthetic construct
  REGION 1..7: note = n-mer motif
RGNTLEM

SEQ ID NO: 7261 - protein, 7 aa, synthetic construct
  REGION 1..7: note = n-mer motif
GINHVAS

SEQ ID NO: 7262 - protein, 7 aa, synthetic construct
  REGION 1..7: note = n-mer motif
FNETAGR

SEQ ID NO: 7263 - protein, 7 aa, synthetic construct
  REGION 1..7: note = n-mer motif
ASQSEKN

SEQ ID NO: 7264 - protein, 7 aa, synthetic construct
  REGION 1..7: note = n-mer motif
ELNERNL

SEQ ID NO: 7265 - protein, 7 aa, synthetic construct
  REGION 1..7: note = n-mer motif
GEQSHNQ

SEQ ID NO: 7266 - protein, 7 aa, synthetic construct
  REGION 1..7: note = n-mer motif
LTNDNKL

SEQ ID NO: 7267 - protein, 7 aa, synthetic construct
  REGION 1..7: note = n-mer motif
SYGQGLE

SEQ ID NO: 7268 - protein, 7 aa, synthetic construct
  REGION 1..7: note = n-mer motif
HSDMGSS

SEQ ID NO: 7269 - protein, 7 aa, synthetic construct
  REGION 1..7: note = n-mer motif
ALKSDSA

SEQ ID NO: 7270 - protein, 7 aa, synthetic construct
  REGION 1..7: note = n-mer motif
TNLSPKT

SEQ ID NO: 7271 - protein, 7 aa, synthetic construct
  REGION 1..7: note = n-mer motif
ADTNIIV

SEQ ID NO: 7272 - protein, 7 aa, synthetic construct
  REGION 1..7: note = n-mer motif
SEGSSRS

SEQ ID NO: 7273 - protein, 7 aa, synthetic construct
  REGION 1..7: note = n-mer motif
NSSNTGW

SEQ ID NO: 7274 - protein, 7 aa, synthetic construct
  REGION 1..7: note = n-mer motif
VTNESRA

SEQ ID NO: 7275 - protein, 7 aa, synthetic construct
  REGION 1..7: note = n-mer motif
GRHTLAD

SEQ ID NO: 7276 - protein, 7 aa, synthetic construct
  REGION 1..7: note = n-mer motif
AVVNVAQ

SEQ ID NO: 7277 - protein, 6 aa, synthetic construct
  REGION 1..6: note = n-mer motif
KKPQQL

SEQ ID NO: 7278 - protein, 7 aa, synthetic construct
  REGION 1..7: note = n-mer motif
GNASGNP

SEQ ID NO: 7279 - protein, 7 aa, synthetic construct
  REGION 1..7: note = n-mer motif
FAAGAHG

SEQ ID NO: 7280 - protein, 7 aa, synthetic construct
  REGION 1..7: note = n-mer motif
GGNQNLT

SEQ ID NO: 7281 - protein, 7 aa, synthetic construct
  REGION 1..7: note = n-mer motif
HTQSTGY

SEQ ID NO: 7282 - protein, 7 aa, synthetic construct
  REGION 1..7: note = n-mer motif
LLGNAPT

SEQ ID NO: 7283 - protein, 7 aa, synthetic construct
  REGION 1..7: note = n-mer motif
EKGNSGV

SEQ ID NO: 7284 - protein, 7 aa, synthetic construct
  REGION 1..7: note = n-mer motif
GTEPRTA

SEQ ID NO: 7285 - protein, 7 aa, synthetic construct
  REGION 1..7: note = n-mer motif
MHAQESR

SEQ ID NO: 7286 - protein, 7 aa, synthetic construct
  REGION 1..7: note = n-mer motif
LISTGNN

SEQ ID NO: 7287 - protein, 7 aa, synthetic construct
  REGION 1..7: note = n-mer motif
KNNNSDS

SEQ ID NO: 7288 - protein, 7 aa, synthetic construct
  REGION 1..7: note = n-mer motif
GTLASMS

SEQ ID NO: 7289 - protein, 7 aa, synthetic construct
  REGION 1..7: note = n-mer motif
RIDTLLV

SEQ ID NO: 7290 - protein, 7 aa, synthetic construct
  REGION 1..7: note = n-mer motif
ISGSHLN

SEQ ID NO: 7291 - protein, 7 aa, synthetic construct
  REGION 1..7: note = n-mer motif
TVEGSYP

SEQ ID NO: 7292 - protein, 7 aa, synthetic construct
  REGION 1..7: note = n-mer motif
TEYLAGL

SEQ ID NO: 7293 - protein, 7 aa, synthetic construct
  REGION 1..7: note = n-mer motif
YLEGAHR

SEQ ID NO: 7294 - protein, 7 aa, synthetic construct
  REGION 1..7: note = n-mer motif
LSATSTM

SEQ ID NO: 7295 - protein, 7 aa, synthetic construct
  REGION 1..7: note = n-mer motif
MLSQVLT

SEQ ID NO: 7296 - protein, 7 aa, synthetic construct
  REGION 1..7: note = n-mer motif
ARNVMLG

SEQ ID NO: 7297 - protein, 7 aa, synthetic construct
  REGION 1..7: note = n-mer motif
LHGNFSQ

SEQ ID NO: 7298 - protein, 7 aa, synthetic construct
  REGION 1..7: note = n-mer motif
GHGSDLT

SEQ ID NO: 7299 - protein, 7 aa, synthetic construct
  REGION 1..7: note = n-mer motif
GVNYHTT

SEQ ID NO: 7300 - protein, 7 aa, synthetic construct
  REGION 1..7: note = n-mer motif
YLQTGTL

SEQ ID NO: 7301 - protein, 7 aa, synthetic construct
  REGION 1..7: note = n-mer motif
VNGGKPV

SEQ ID NO: 7302 - protein, 7 aa, synthetic construct
  REGION 1..7: note = n-mer motif
EVGKTTH

SEQ ID NO: 7303 - protein, 7 aa, synthetic construct
  REGION 1..7: note = n-mer motif
RPPNENR

SEQ ID NO: 7304 - protein, 7 aa, synthetic construct
  REGION 1..7: note = n-mer motif
VDKNHPL

SEQ ID NO: 7305 - protein, 7 aa, synthetic construct
  REGION 1..7: note = n-mer motif
SKSTEIM

SEQ ID NO: 7306 - protein, 7 aa, synthetic construct
  REGION 1..7: note = n-mer motif
TALLSNL

SEQ ID NO: 7307 - protein, 7 aa, synthetic construct
  REGION 1..7: note = n-mer motif
MHTSRPP

SEQ ID NO: 7308 - protein, 7 aa, synthetic construct
  REGION 1..7: note = n-mer motif
TPTNGNP

SEQ ID NO: 7309 - protein, 7 aa, synthetic construct
  REGION 1..7: note = n-mer motif
TTSVEKT

SEQ ID NO: 7310 - protein, 7 aa, synthetic construct
  REGION 1..7: note = n-mer motif
QYDASRQ

SEQ ID NO: 7311 - protein, 7 aa, synthetic construct
  REGION 1..7: note = n-mer motif
YNAHESF

SEQ ID NO: 7312 - protein, 7 aa, synthetic construct
  REGION 1..7: note = n-mer motif
DNQQALA

SEQ ID NO: 7313 - protein, 7 aa, synthetic construct
  REGION 1..7: note = n-mer motif
TKSFNDL

SEQ ID NO: 7314 - protein, 7 aa, synthetic construct
  REGION 1..7: note = n-mer motif
LADSNSK

SEQ ID NO: 7315 - protein, 7 aa, synthetic construct
  REGION 1..7: note = n-mer motif
PSTHGYV

SEQ ID NO: 7316 - protein, 7 aa, synthetic construct
  REGION 1..7: note = n-mer motif
QVQGTLG

SEQ ID NO: 7317 - protein, 7 aa, synthetic construct
  REGION 1..7: note = n-mer motif
LTAVAIS

SEQ ID NO: 7318 - protein, 7 aa, synthetic construct
  REGION 1..7: note = n-mer motif
RYESTSA

SEQ ID NO: 7319 - protein, 7 aa, synthetic construct
  REGION 1..7: note = n-mer motif
ADHNHIA

SEQ ID NO: 7320 - protein, 7 aa, synthetic construct
  REGION 1..7: note = n-mer motif
WNAENSK

SEQ ID NO: 7321 - protein, 7 aa, synthetic construct
  REGION 1..7: note = n-mer motif
NSVVGNI

SEQ ID NO: 7322 - protein, 7 aa, synthetic construct
  REGION 1..7: note = n-mer motif
FGATTTA

SEQ ID NO: 7323 - protein, 7 aa, synthetic construct
  REGION 1..7: note = n-mer motif
ASGSEMP

SEQ ID NO: 7324 - protein, 7 aa, synthetic construct
  REGION 1..7: note = n-mer motif
DGTKSGM

SEQ ID NO: 7325 - protein, 7 aa, synthetic construct
  REGION 1..7: note = n-mer motif
YTADKKQ

SEQ ID NO: 7326 - protein, 7 aa, synthetic construct
  REGION 1..7: note = n-mer motif
PIAERPS

SEQ ID NO: 7327 - protein, 7 aa, synthetic construct
  REGION 1..7: note = n-mer motif
SNSYLLN

SEQ ID NO: 7328 - protein, 7 aa, synthetic construct
  REGION 1..7: note = n-mer motif
TRELTKN

SEQ ID NO: 7329 - protein, 7 aa, synthetic construct
  REGION 1..7: note = n-mer motif
LGNHYTP

SEQ ID NO: 7330 - protein, 7 aa, synthetic construct
  REGION 1..7: note = n-mer motif
LLQSIVV

SEQ ID NO: 7331 - protein, 7 aa, synthetic construct
  REGION 1..7: note = n-mer motif
MMANNMQ

SEQ ID NO: 7332 - protein, 7 aa, synthetic construct
  REGION 1..7: note = n-mer motif
GADTSTR

SEQ ID NO: 7333 - protein, 7 aa, synthetic construct
  REGION 1..7: note = n-mer motif
GFGHVPE

SEQ ID NO: 7334 - protein, 7 aa, synthetic construct
  REGION 1..7: note = n-mer motif
NVMHSSS

SEQ ID NO: 7335 - protein, 7 aa, synthetic construct
  REGION 1..7: note = n-mer motif
SASKVEY

SEQ ID NO: 7336 - protein, 7 aa, synthetic construct
  REGION 1..7: note = n-mer motif
ISSYDGN

SEQ ID NO: 7337 - protein, 7 aa, synthetic construct
  REGION 1..7: note = n-mer motif
KKTKTLT

SEQ ID NO: 7338 - protein, 7 aa, synthetic construct
  REGION 1..7: note = n-mer motif
GTILPNQ

SEQ ID NO: 7339 - protein, 7 aa, synthetic construct
  REGION 1..7: note = n-mer motif
LNVVPTQ

SEQ ID NO: 7340 - protein, 7 aa, synthetic construct
  REGION 1..7: note = n-mer motif
SSVTSRE

SEQ ID NO: 7341 - protein, 7 aa, synthetic construct
  REGION 1..7: note = n-mer motif
PINVLTT

SEQ ID NO: 7342 - protein, 7 aa, synthetic construct
  REGION 1..7: note = n-mer motif
GDKASLA

SEQ ID NO: 7343 - protein, 7 aa, synthetic construct
  REGION 1..7: note = n-mer motif
RMSESSD

SEQ ID NO: 7344 - protein, 7 aa, synthetic construct
  REGION 1..7: note = n-mer motif
NLLTSSP

SEQ ID NO: 7345 - protein, 7 aa, synthetic construct
  REGION 1..7: note = n-mer motif
SRLSQDP

SEQ ID NO: 7346 - protein, 7 aa, synthetic construct
  REGION 1..7: note = n-mer motif
WSNAQSP

SEQ ID NO: 7347 - protein, 7 aa, synthetic construct
  REGION 1..7: note = n-mer motif
GRHLQSD

SEQ ID NO: 7348 - protein, 7 aa, synthetic construct
  REGION 1..7: note = n-mer motif
MSLASTQ

SEQ ID NO: 7349 - protein, 7 aa, synthetic construct
  REGION 1..7: note = n-mer motif
MSTVLRE

SEQ ID NO: 7350 - protein, 7 aa, synthetic construct
  REGION 1..7: note = n-mer motif
SKSENLQ

SEQ ID NO: 7351 - protein, 7 aa, synthetic construct
  REGION 1..7: note = n-mer motif
WTEGGSG

SEQ ID NO: 7352 - protein, 7 aa, synthetic construct
  REGION 1..7: note = n-mer motif
STTVWTA

SEQ ID NO: 7353 - protein, 7 aa, synthetic construct
  REGION 1..7: note = n-mer motif
VSLESRL

SEQ ID NO: 7354 - protein, 7 aa, synthetic construct
  REGION 1..7: note = n-mer motif
SMYGQAG

SEQ ID NO: 7355 - protein, 7 aa, synthetic construct
  REGION 1..7: note = n-mer motif
TNTQNNP

SEQ ID NO: 7356 - protein, 7 aa, synthetic construct
  REGION 1..7: note = n-mer motif
VGDRNLV

SEQ ID NO: 7357 - protein, 7 aa, synthetic construct
  REGION 1..7: note = n-mer motif
LAHNYLS

SEQ ID NO: 7358 - protein, 7 aa, synthetic construct
  REGION 1..7: note = n-mer motif
WTANQGL

SEQ ID NO: 7359 - protein, 7 aa, synthetic construct
  REGION 1..7: note = n-mer motif
VFREGIV

SEQ ID NO: 7360 - protein, 7 aa, synthetic construct
  REGION 1..7: note = n-mer motif
QVQHERV

SEQ ID NO: 7361 - protein, 7 aa, synthetic construct
  REGION 1..7: note = n-mer motif
QILNYSV

SEQ ID NO: 7362 - protein, 7 aa, synthetic construct
  REGION 1..7: note = n-mer motif
STIGNST

SEQ ID NO: 7363 - protein, 7 aa, synthetic construct
  REGION 1..7: note = n-mer motif
PIHHGSS

SEQ ID NO: 7364 - protein, 7 aa, synthetic construct
  REGION 1..7: note = n-mer motif
IATNVIY

SEQ ID NO: 7365 - protein, 7 aa, synthetic construct
  REGION 1..7: note = n-mer motif
QGGTNNP

SEQ ID NO: 7366 - protein, 7 aa, synthetic construct
  REGION 1..7: note = n-mer motif
TRGNDIS

SEQ ID NO: 7367 - protein, 7 aa, synthetic construct
  REGION 1..7: note = n-mer motif
QTLIVGS

SEQ ID NO: 7368 - protein, 7 aa, synthetic construct
  REGION 1..7: note = n-mer motif
RGLPDVN

SEQ ID NO: 7369 - protein, 7 aa, synthetic construct
  REGION 1..7: note = n-mer motif
LNVNTLN

SEQ ID NO: 7370 - protein, 7 aa, synthetic construct
  REGION 1..7: note = n-mer motif
GTKSWPV

SEQ ID NO: 7371 - protein, 7 aa, synthetic construct
  REGION 1..7: note = n-mer motif
THLVSDS

SEQ ID NO: 7372 - protein, 7 aa, synthetic construct
  REGION 1..7: note = n-mer motif
WTGAQPS

SEQ ID NO: 7373 - protein, 7 aa, synthetic construct
  REGION 1..7: note = n-mer motif
SAMHTLV

SEQ ID NO: 7374 - protein, 7 aa, synthetic construct
  REGION 1..7: note = n-mer motif
SQHHTPL

SEQ ID NO: 7375 - protein, 7 aa, synthetic construct
  REGION 1..7: note = n-mer motif
DNRMEAT

SEQ ID NO: 7376 - protein, 7 aa, synthetic construct
  REGION 1..7: note = n-mer motif
LGGTLGI

SEQ ID NO: 7377 - protein, 7 aa, synthetic construct
  REGION 1..7: note = n-mer motif
FHNESYG

SEQ ID NO: 7378 - protein, 7 aa, synthetic construct
  REGION 1..7: note = n-mer motif
IRTSVIN

SEQ ID NO: 7379 - protein, 7 aa, synthetic construct
  REGION 1..7: note = n-mer motif
YNTVDQR

SEQ ID NO: 7380 - protein, 7 aa, synthetic construct
  REGION 1..7: note = n-mer motif
AHQTAGP

SEQ ID NO: 7381 - protein, 7 aa, synthetic construct
  REGION 1..7: note = n-mer motif
PPESARG

SEQ ID NO: 7382 - protein, 7 aa, synthetic construct
  REGION 1..7: note = n-mer motif
NNTLNIL

SEQ ID NO: 7383 - protein, 7 aa, synthetic construct
  REGION 1..7: note = n-mer motif
ASYSSMV

SEQ ID NO: 7384 - protein, 7 aa, synthetic construct
  REGION 1..7: note = n-mer motif
SGQNGTS

SEQ ID NO: 7385 - protein, 7 aa, synthetic construct
  REGION 1..7: note = n-mer motif
LSSMSTD

SEQ ID NO: 7386 - protein, 7 aa, synthetic construct
  REGION 1..7: note = n-mer motif
VASMVHN

SEQ ID NO: 7387 - protein, 7 aa, synthetic construct
  REGION 1..7: note = n-mer motif
TQLSDGC

SEQ ID NO: 7388 - protein, 7 aa, synthetic construct
  REGION 1..7: note = n-mer motif
AIVDRGS

SEQ ID NO: 7389 - protein, 7 aa, synthetic construct
  REGION 1..7: note = n-mer motif
NRQRDFE

SEQ ID NO: 7390 - protein, 7 aa, synthetic construct
  REGION 1..7: note = n-mer motif
AHQKDIR

SEQ ID NO: 7391 - protein, 7 aa, synthetic construct
  REGION 1..7: note = n-mer motif
FTERALQ

SEQ ID NO: 7392 - protein, 7 aa, synthetic construct
  REGION 1..7: note = n-mer motif
MLSHGAL

SEQ ID NO: 7393 - protein, 7 aa, synthetic construct
  REGION 1..7: note = n-mer motif
SVTNGAE

SEQ ID NO: 7394 - protein, 7 aa, synthetic construct
  REGION 1..7: note = n-mer motif
ITAASPQ

SEQ ID NO: 7395 - protein, 7 aa, synthetic construct
  REGION 1..7: note = n-mer motif
QNTQRYL

SEQ ID NO: 7396 - protein, 7 aa, synthetic construct
  REGION 1..7: note = n-mer motif
TGQGFSA

SEQ ID NO: 7397 - protein, 7 aa, synthetic construct
  REGION 1..7: note = n-mer motif
SFEKNGI

SEQ ID NO: 7398 - protein, 7 aa, synthetic construct
  REGION 1..7: note = n-mer motif
LTSHSAG

SEQ ID NO: 7399 - protein, 7 aa, synthetic construct
  REGION 1..7: note = n-mer motif
STIGNST

SEQ ID NO: 7400 - protein, 7 aa, synthetic construct
  REGION 1..7: note = n-mer motif
GLSRNDG

SEQ ID NO: 7401 - protein, 7 aa, synthetic construct
  REGION 1..7: note = n-mer motif
STTHPSE

SEQ ID NO: 7402 - protein, 7 aa, synthetic construct
  REGION 1..7: note = n-mer motif
PSTNESR

SEQ ID NO: 7403 - protein, 7 aa, synthetic construct
  REGION 1..7: note = n-mer motif
GTKDILI

SEQ ID NO: 7404 - protein, 7 aa, synthetic construct
  REGION 1..7: note = n-mer motif
STINMRA

SEQ ID NO: 7405 - protein, 7 aa, synthetic construct
  REGION 1..7: note = n-mer motif
YIAGGEQ

SEQ ID NO: 7406 - protein, 7 aa, synthetic construct
  REGION 1..7: note = n-mer motif
SSGQPLV

SEQ ID NO: 7407 - protein, 7 aa, synthetic construct
  REGION 1..7: note = n-mer motif
DKQQTGQ

SEQ ID NO: 7408 - protein, 7 aa, synthetic construct
  REGION 1..7: note = n-mer motif
GLGQPQL

SEQ ID NO: 7409 - protein, 7 aa, synthetic construct
  REGION 1..7: note = n-mer motif
SPQHGVI

SEQ ID NO: 7410 - protein, 7 aa, synthetic construct
  REGION 1..7: note = n-mer motif
YRGREDW

SEQ ID NO: 7411 - protein, 7 aa, synthetic construct
  REGION 1..7: note = n-mer motif
AGGLLSR

SEQ ID NO: 7412 - protein, 7 aa, synthetic construct
  REGION 1..7: note = n-mer motif
PIQQASL

SEQ ID NO: 7413 - protein, 7 aa, synthetic construct
  REGION 1..7: note = n-mer motif
WSAGERV

SEQ ID NO: 7414 - protein, 7 aa, synthetic construct
  REGION 1..7: note = n-mer motif
RGDVATT

SEQ ID NO: 7415 - protein, 7 aa, synthetic construct
  REGION 1..7: note = n-mer motif
LTGQNEF

SEQ ID NO: 7416 - protein, 7 aa, synthetic construct
  REGION 1..7: note = n-mer motif
TTPPFSN

SEQ ID NO: 7417 - protein, 7 aa, synthetic construct
  REGION 1..7: note = n-mer motif
TSIGSAK

SEQ ID NO: 7418 - protein, 7 aa, synthetic construct
  REGION 1..7: note = n-mer motif
NVQNVPG

SEQ ID NO: 7419 - protein, 7 aa, synthetic construct
  REGION 1..7: note = n-mer motif
YTGTLVV

SEQ ID NO: 7420 - protein, 7 aa, synthetic construct
  REGION 1..7: note = n-mer motif
GTHASAY

SEQ ID NO: 7421 - protein, 7 aa, synthetic construct
  REGION 1..7: note = n-mer motif
LVVSNSL

SEQ ID NO: 7422 - protein, 7 aa, synthetic construct
  REGION 1..7: note = n-mer motif
THLVRDS

SEQ ID NO: 7423 - protein, 7 aa, synthetic construct
  REGION 1..7: note = n-mer motif
NHGRAID

SEQ ID NO: 7424 - protein, 7 aa, synthetic construct
  REGION 1..7: note = n-mer motif
PKTLTST

SEQ ID NO: 7425 - protein, 7 aa, synthetic construct
  REGION 1..7: note = n-mer motif
FGIGHGT

SEQ ID NO: 7426 - protein, 7 aa, synthetic construct
  REGION 1..7: note = n-mer motif
ALPSRER

SEQ ID NO: 7427 - protein, 7 aa, synthetic construct
  REGION 1..7: note = n-mer motif
ATRGESS

SEQ ID NO: 7428 - protein, 7 aa, synthetic construct
  REGION 1..7: note = n-mer motif
GTTEVNK

SEQ ID NO: 7429 - protein, 7 aa, synthetic construct
  REGION 1..7: note = n-mer motif
THTLGGT

SEQ ID NO: 7430 - protein, 7 aa, synthetic construct
  REGION 1..7: note = n-mer motif
EAVTSKW

SEQ ID NO: 7431 - protein, 7 aa, synthetic construct
  REGION 1..7: note = n-mer motif
HYGNKDI

SEQ ID NO: 7432 - protein, 7 aa, synthetic construct
  REGION 1..7: note = n-mer motif
ISTHTMT

SEQ ID NO: 7433 - protein, 7 aa, synthetic construct
  REGION 1..7: note = n-mer motif
DTYNSNT

SEQ ID NO: 7434 - protein, 7 aa, synthetic construct
  REGION 1..7: note = n-mer motif
VFTGQTE

SEQ ID NO: 7435 - protein, 7 aa, synthetic construct
  REGION 1..7: note = n-mer motif
SVTSGTQ

SEQ ID NO: 7436 - protein, 7 aa, synthetic construct
  REGION 1..7: note = n-mer motif
HTYSQAD

SEQ ID NO: 7437 - protein, 7 aa, synthetic construct
  REGION 1..7: note = n-mer motif
VAGLVDI

SEQ ID NO: 7438 - protein, 7 aa, synthetic construct
  REGION 1..7: note = n-mer motif
DSTKAMQ

SEQ ID NO: 7439 - protein, 7 aa, synthetic construct
  REGION 1..7: note = n-mer motif
EGHNRGI

SEQ ID NO: 7440 - protein, 7 aa, synthetic construct
  REGION 1..7: note = n-mer motif
GLHGTSN

SEQ ID NO: 7441 - protein, 7 aa, synthetic construct
  REGION 1..7: note = n-mer motif
PLSLHNS

SEQ ID NO: 7442 - protein, 7 aa, synthetic construct
  REGION 1..7: note = n-mer motif
ASDKGAN

SEQ ID NO: 7443 - protein, 7 aa, synthetic construct
  REGION 1..7: note = n-mer motif
VLLQNSH

SEQ ID NO: 7444 - protein, 7 aa, synthetic construct
  REGION 1..7: note = n-mer motif
LYDGKHV

SEQ ID NO: 7445 - protein, 7 aa, synthetic construct
  REGION 1..7: note = n-mer motif
TQGSNTT

SEQ ID NO: 7446 - protein, 7 aa, synthetic construct
  REGION 1..7: note = n-mer motif
FLDKYNY

SEQ ID NO: 7447 - protein, 7 aa, synthetic construct
  REGION 1..7: note = n-mer motif
DTGIKNV

SEQ ID NO: 7448 - protein, 7 aa, synthetic construct
  REGION 1..7: note = n-mer motif
SGAAQNP

SEQ ID NO: 7449 - protein, 7 aa, synthetic construct
  REGION 1..7: note = n-mer motif
TLHTKDL

SEQ ID NO: 7450 - protein, 7 aa, synthetic construct
  REGION 1..7: note = n-mer motif
ATYVVGT

SEQ ID NO: 7451 - protein, 7 aa, synthetic construct
  REGION 1..7: note = n-mer motif
LVGTLVY

SEQ ID NO: 7452 - protein, 7 aa, synthetic construct
  REGION 1..7: note = n-mer motif
SNTTVQL

SEQ ID NO: 7453 - protein, 7 aa, synthetic construct
  REGION 1..7: note = n-mer motif
KAQINQM

SEQ ID NO: 7454 - protein, 7 aa, synthetic construct
  REGION 1..7: note = n-mer motif
RNATVTV

SEQ ID NO: 7455 - protein, 7 aa, synthetic construct
  REGION 1..7: note = n-mer motif
ATRVGNH

SEQ ID NO: 7456 - protein, 7 aa, synthetic construct
  REGION 1..7: note = n-mer motif
SYQNPPP

SEQ ID NO: 7457 - protein, 7 aa, synthetic construct
  REGION 1..7: note = n-mer motif
FDSYNIV

SEQ ID NO: 7458 - protein, 7 aa, synthetic construct
  REGION 1..7: note = n-mer motif
ATLSPHA

SEQ ID NO: 7459 - protein, 7 aa, synthetic construct
  REGION 1..7: note = n-mer motif
WESPTNA

SEQ ID NO: 7460 - protein, 7 aa, synthetic construct
  REGION 1..7: note = n-mer motif
IENVNHL

SEQ ID NO: 7461 - protein, 7 aa, synthetic construct
  REGION 1..7: note = n-mer motif
YRASDVA

SEQ ID NO: 7462 - protein, 7 aa, synthetic construct
  REGION 1..7: note = n-mer motif
HMSSVAT

SEQ ID NO: 7463 - protein, 7 aa, synthetic construct
  REGION 1..7: note = n-mer motif
IQRDVGH

SEQ ID NO: 7464 - protein, 7 aa, synthetic construct
  REGION 1..7: note = n-mer motif
ESVRETI

SEQ ID NO: 7465 - protein, 7 aa, synthetic construct
  REGION 1..7: note = n-mer motif
QGGNSRF

SEQ ID NO: 7466 - protein, 7 aa, synthetic construct
  REGION 1..7: note = n-mer motif
EKGTPSS

SEQ ID NO: 7467 - protein, 7 aa, synthetic construct
  REGION 1..7: note = n-mer motif
HDSTTRP

SEQ ID NO: 7468 - protein, 7 aa, synthetic construct
  REGION 1..7: note = n-mer motif
LPTGVLP

SEQ ID NO: 7469 - protein, 7 aa, synthetic construct
  REGION 1..7: note = n-mer motif
TLGYPDK

SEQ ID NO: 7470 - protein, 7 aa, synthetic construct
  REGION 1..7: note = n-mer motif
ANTVTER

SEQ ID NO: 7471 - protein, 7 aa, synthetic construct
  REGION 1..7: note = n-mer motif
HDKSIQP

SEQ ID NO: 7472 - protein, 7 aa, synthetic construct
  REGION 1..7: note = n-mer motif
GGTALGS

SEQ ID NO: 7473 - protein, 7 aa, synthetic construct
  REGION 1..7: note = n-mer motif
GGNYHTT

SEQ ID NO: 7474 - protein, 7 aa, synthetic construct
  REGION 1..7: note = n-mer motif
ISEMTRY

SEQ ID NO: 7475 - protein, 7 aa, synthetic construct
  REGION 1..7: note = n-mer motif
VESKSEP

SEQ ID NO: 7476 - protein, 7 aa, synthetic construct
  REGION 1..7: note = n-mer motif
DRAQNNE

SEQ ID NO: 7477 - protein, 7 aa, synthetic construct
  REGION 1..7: note = n-mer motif
TAQTGWV

SEQ ID NO: 7478 - protein, 7 aa, synthetic construct
  REGION 1..7: note = n-mer motif
GFGHLPE

SEQ ID NO: 7479 - protein, 7 aa, synthetic construct
  REGION 1..7: note = n-mer motif
PITGFSV

SEQ ID NO: 7480 - protein, 7 aa, synthetic construct
  REGION 1..7: note = n-mer motif
DRTYSNT

SEQ ID NO: 7481 - protein, 7 aa, synthetic construct
  REGION 1..7: note = n-mer motif
MSNASYI

SEQ ID NO: 7482 - protein, 7 aa, synthetic construct
  REGION 1..7: note = n-mer motif
DNSRPEV

SEQ ID NO: 7483 - protein, 7 aa, synthetic construct
  REGION 1..7: note = n-mer motif
SSSQTVL

SEQ ID NO: 7484 - protein, 7 aa, synthetic construct
  REGION 1..7: note = n-mer motif
SNLDGTI

SEQ ID NO: 7485 - protein, 7 aa, synthetic construct
  REGION 1..7: note = n-mer motif
SNMREEI

SEQ ID NO: 7486 - protein, 7 aa, synthetic construct
  REGION 1..7: note = n-mer motif
RLTELVI

SEQ ID NO: 7487 - protein, 7 aa, synthetic construct
  REGION 1..7: note = n-mer motif
QVSLVKL

SEQ ID NO: 7488 - protein, 7 aa, synthetic construct
  REGION 1..7: note = n-mer motif
EIHTTTG

SEQ ID NO: 7489 - protein, 7 aa, synthetic construct
  REGION 1..7: note = n-mer motif
SRIENNN

SEQ ID NO: 7490 - protein, 7 aa, synthetic construct
  REGION 1..7: note = n-mer motif
GTGKEVR

SEQ ID NO: 7491 - protein, 7 aa, synthetic construct
  REGION 1..7: note = n-mer motif
WQDHNKV

SEQ ID NO: 7492 - protein, 7 aa, synthetic construct
  REGION 1..7: note = n-mer motif
STNSIGA

SEQ ID NO: 7493 - protein, 7 aa, synthetic construct
  REGION 1..7: note = n-mer motif
SELMVRP

SEQ ID NO: 7494 - protein, 7 aa, synthetic construct
  REGION 1..7: note = n-mer motif
PLQNNKT

SEQ ID NO: 7495 - protein, 7 aa, synthetic construct
  REGION 1..7: note = n-mer motif
PYANRLE

SEQ ID NO: 7496 - protein, 7 aa, synthetic construct
  REGION 1..7: note = n-mer motif
GTVSLIP

SEQ ID NO: 7497 - protein, 7 aa, synthetic construct
  REGION 1..7: note = n-mer motif
DVYLKSP

SEQ ID NO: 7498 - protein, 7 aa, synthetic construct
  REGION 1..7: note = n-mer motif
LPDKGRI

SEQ ID NO: 7499 - protein, 7 aa, synthetic construct
  REGION 1..7: note = n-mer motif
SITTVAN

SEQ ID NO: 7500 - protein, 7 aa, synthetic construct
  REGION 1..7: note = n-mer motif
PLQSQSG

SEQ ID NO: 7501 - protein, 7 aa, synthetic construct
  REGION 1..7: note = n-mer motif
NNMGHGH

SEQ ID NO: 7502 - protein, 7 aa, synthetic construct
  REGION 1..7: note = n-mer motif
SGQKNSE

SEQ ID NO: 7503 - protein, 7 aa, synthetic construct
  REGION 1..7: note = n-mer motif
TEAGRPQ

SEQ ID NO: 7504 - protein, 7 aa, synthetic construct
  REGION 1..7: note = n-mer motif
TLHTKDL

SEQ ID NO: 7505 - protein, 7 aa, synthetic construct
  REGION 1..7: note = n-mer motif
LRDLNGG

SEQ ID NO: 7506 - protein, 7 aa, synthetic construct
  REGION 1..7: note = n-mer motif
VCVTTCA

SEQ ID NO: 7507 - protein, 7 aa, synthetic construct
  REGION 1..7: note = n-mer motif
VTAAQPQ

SEQ ID NO: 7508 - protein, 7 aa, synthetic construct
  REGION 1..7: note = n-mer motif
ATFSHAG

SEQ ID NO: 7509 - protein, 7 aa, synthetic construct
  REGION 1..7: note = n-mer motif
TYAPRSP

SEQ ID NO: 7510 - protein, 7 aa, synthetic construct
  REGION 1..7: note = n-mer motif
TSEMRTA

SEQ ID NO: 7511 - protein, 7 aa, synthetic construct
  REGION 1..7: note = n-mer motif
YSTTMLN

SEQ ID NO: 7512 - protein, 7 aa, synthetic construct
  REGION 1..7: note = n-mer motif
SFTNTNP

SEQ ID NO: 7513 - protein, 7 aa, synthetic construct
  REGION 1..7: note = n-mer motif
SPPSTSG

SEQ ID NO: 7514 - protein, 7 aa, synthetic construct
  REGION 1..7: note = n-mer motif
VTTVDSA

SEQ ID NO: 7515 - protein, 7 aa, synthetic construct
  REGION 1..7: note = n-mer motif
EAHNRVI

SEQ ID NO: 7516 - protein, 7 aa, synthetic construct
  REGION 1..7: note = n-mer motif
MELTSTS

SEQ ID NO: 7517 - protein, 7 aa, synthetic construct
  REGION 1..7: note = n-mer motif
HLVTSGI

SEQ ID NO: 7518 - protein, 7 aa, synthetic construct
  REGION 1..7: note = n-mer motif
QTITSQM

SEQ ID NO: 7519 - protein, 7 aa, synthetic construct
  REGION 1..7: note = n-mer motif
TANSTYV

SEQ ID NO: 7520 - protein, 7 aa, synthetic construct
  REGION 1..7: note = n-mer motif
LIQLSGQ

SEQ ID NO: 7521 - protein, 7 aa, synthetic construct
  REGION 1..7: note = n-mer motif
SYVSVPA

SEQ ID NO: 7522 - protein, 7 aa, synthetic construct
  REGION 1..7: note = n-mer motif
VHGNAPA

SEQ ID NO: 7523 - protein, 7 aa, synthetic construct
  REGION 1..7: note = n-mer motif
AGKTHAD

SEQ ID NO: 7524 - protein, 7 aa, synthetic construct
  REGION 1..7: note = n-mer motif
TFHQGVK

SEQ ID NO: 7525 - protein, 7 aa, synthetic construct
  REGION 1..7: note = n-mer motif
LGNNRPL

SEQ ID NO: 7526 - protein, 7 aa, synthetic construct
  REGION 1..7: note = n-mer motif
LHLVRSF

SEQ ID NO: 7527 - protein, 7 aa, synthetic construct
  REGION 1..7: note = n-mer motif
SYSTSTP

SEQ ID NO: 7528 - protein, 7 aa, synthetic construct
  REGION 1..7: note = n-mer motif
ISQGSSL

SEQ ID NO: 7529 - protein, 7 aa, synthetic construct
  REGION 1..7: note = n-mer motif
LQLATSH

SEQ ID NO: 7530 - protein, 7 aa, synthetic construct
  REGION 1..7: note = n-mer motif
VTQRFAE

SEQ ID NO: 7531 - protein, 7 aa, synthetic construct
  REGION 1..7: note = n-mer motif
AIDSIKM

SEQ ID NO: 7532 - protein, 7 aa, synthetic construct
  REGION 1..7: note = n-mer motif
DAHTFSR

SEQ ID NO: 7533 - protein, 7 aa, synthetic construct
  REGION 1..7: note = n-mer motif
RGSDGGL

SEQ ID NO: 7534 - protein, 7 aa, synthetic construct
  REGION 1..7: note = n-mer motif
LAQGTDR

SEQ ID NO: 7535 - protein, 7 aa, synthetic construct
  REGION 1..7: note = n-mer motif
KNNNSDS

SEQ ID NO: 7536 - protein, 7 aa, synthetic construct
  REGION 1..7: note = n-mer motif
ENEKRES

SEQ ID NO: 7537 - protein, 7 aa, synthetic construct
  REGION 1..7: note = n-mer motif
NEQFEKV

SEQ ID NO: 7538 - protein, 7 aa, synthetic construct
  REGION 1..7: note = n-mer motif
TQVVART

SEQ ID NO: 7539 - protein, 7 aa, synthetic construct
  REGION 1..7: note = n-mer motif
GVNVTNS

SEQ ID NO: 7540 - protein, 7 aa, synthetic construct
  REGION 1..7: note = n-mer motif
ADKGFGH

SEQ ID NO: 7541 - protein, 7 aa, synthetic construct
  REGION 1..7: note = n-mer motif
THKQVDL

SEQ ID NO: 7542 - protein, 7 aa, synthetic construct
  REGION 1..7: note = n-mer motif
SANLYKQ

SEQ ID NO: 7543 - protein, 7 aa, synthetic construct
  REGION 1..7: note = n-mer motif
KLHTKDL

SEQ ID NO: 7544 - protein, 7 aa, synthetic construct
  REGION 1..7: note = n-mer motif
VVVHTIP

SEQ ID NO: 7545 - protein, 7 aa, synthetic construct
  REGION 1..7: note = n-mer motif
STSQAVQ

SEQ ID NO: 7546 - protein, 7 aa, synthetic construct
  REGION 1..7: note = n-mer motif
RNGSAQS

SEQ ID NO: 7547 - protein, 7 aa, synthetic construct
  REGION 1..7: note = n-mer motif
HYGNKDI

SEQ ID NO: 7548 - protein, 7 aa, synthetic construct
  REGION 1..7: note = n-mer motif
SFLVAHP

SEQ ID NO: 7549 - protein, 7 aa, synthetic construct
  REGION 1..7: note = n-mer motif
QQNTSLP

SEQ ID NO: 7550 - protein, 7 aa, synthetic construct
  REGION 1..7: note = n-mer motif
MHVDKTS

SEQ ID NO: 7551 - protein, 7 aa, synthetic construct
  REGION 1..7: note = n-mer motif
NNENTRN

SEQ ID NO: 7552 - protein, 7 aa, synthetic construct
  REGION 1..7: note = n-mer motif
SINNIGA

SEQ ID NO: 7553 - protein, 7 aa, synthetic construct
  REGION 1..7: note = n-mer motif
ATISDRA

SEQ ID NO: 7554 - protein, 7 aa, synthetic construct
  REGION 1..7: note = n-mer motif
YSNLVLS

SEQ ID NO: 7555 - protein, 7 aa, synthetic construct
  REGION 1..7: note = n-mer motif
MMNVSGH

SEQ ID NO: 7556 - protein, 7 aa, synthetic construct
  REGION 1..7: note = n-mer motif
GETRSTA

SEQ ID NO: 7557 - protein, 7 aa, synthetic construct
  REGION 1..7: note = n-mer motif
TKGYNDL

SEQ ID NO: 7558 - protein, 7 aa, synthetic construct
  REGION 1..7: note = n-mer motif
AYNMSSV

SEQ ID NO: 7559 - protein, 7 aa, synthetic construct
  REGION 1..7: note = n-mer motif
ADPAKGK

SEQ ID NO: 7560 - protein, 7 aa, synthetic construct
  REGION 1..7: note = n-mer motif
YISAPPM

SEQ ID NO: 7561 - protein, 7 aa, synthetic construct
  REGION 1..7: note = n-mer motif
RNNPSHD

SEQ ID NO: 7562 - protein, 7 aa, synthetic construct
  REGION 1..7: note = n-mer motif
GTSIDYV

SEQ ID NO: 7563 - protein, 7 aa, synthetic construct
  REGION 1..7: note = n-mer motif
GTGYPNQ

SEQ ID NO: 7564 - protein, 7 aa, synthetic construct
  REGION 1..7: note = n-mer motif
DHMNLRS

SEQ ID NO: 7565 - protein, 7 aa, synthetic construct
  REGION 1..7: note = n-mer motif
INSYLHE

SEQ ID NO: 7566 - protein, 7 aa, synthetic construct
  REGION 1..7: note = n-mer motif
WQMGAGS

SEQ ID NO: 7567 - protein, 7 aa, synthetic construct
  REGION 1..7: note = n-mer motif
MGIGSYK

SEQ ID NO: 7568 - protein, 7 aa, synthetic construct
  REGION 1..7: note = n-mer motif
QNHNELK

SEQ ID NO: 7569 - protein, 7 aa, synthetic construct
  REGION 1..7: note = n-mer motif
DKSNYSI

SEQ ID NO: 7570 - protein, 7 aa, synthetic construct
  REGION 1..7: note = n-mer motif
TTKPVAE

SEQ ID NO: 7571 - protein, 7 aa, synthetic construct
  REGION 1..7: note = n-mer motif
VTVSNSL

SEQ ID NO: 7572 - protein, 7 aa, synthetic construct
  REGION 1..7: note = n-mer motif
TAYLDGL

SEQ ID NO: 7573 - protein, 7 aa, synthetic construct
  REGION 1..7: note = n-mer motif
NLQTGVQ

SEQ ID NO: 7574 - protein, 7 aa, synthetic construct
  REGION 1..7: note = n-mer motif
TVAPYSS

SEQ ID NO: 7575 - protein, 7 aa, synthetic construct
  REGION 1..7: note = n-mer motif
VQISMNN

SEQ ID NO: 7576 - protein, 7 aa, synthetic construct
  REGION 1..7: note = n-mer motif
YIAGGEQ

SEQ ID NO: 7577 - protein, 7 aa, synthetic construct
  REGION 1..7: note = n-mer motif
FMEVMKN

SEQ ID NO: 7578 - protein, 7 aa, synthetic construct
  REGION 1..7: note = n-mer motif
TTDKGIN

SEQ ID NO: 7579 - protein, 7 aa, synthetic construct
  REGION 1..7: note = n-mer motif
LSYSIQH

SEQ ID NO: 7580 - protein, 7 aa, synthetic construct
  REGION 1..7: note = n-mer motif
AYNARLP

SEQ ID NO: 7581 - protein, 7 aa, synthetic construct
  REGION 1..7: note = n-mer motif
NTGTTSV

SEQ ID NO: 7582 - protein, 7 aa, synthetic construct
  REGION 1..7: note = n-mer motif
VLSTGLR

SEQ ID NO: 7583 - protein, 7 aa, synthetic construct
  REGION 1..7: note = n-mer motif
NDSSSMS

SEQ ID NO: 7584 - protein, 7 aa, synthetic construct
  REGION 1..7: note = n-mer motif
RQGSLMI

SEQ ID NO: 7585 - protein, 7 aa, synthetic construct
  REGION 1..7: note = n-mer motif
ISTAYML

SEQ ID NO: 7586 - protein, 7 aa, synthetic construct
  REGION 1..7: note = n-mer motif
GTMNIGI

SEQ ID NO: 7587 - protein, 7 aa, synthetic construct
  REGION 1..7: note = n-mer motif
HNNNLLN

SEQ ID NO: 7588 - protein, 7 aa, synthetic construct
  REGION 1..7: note = n-mer motif
HFSQITN

SEQ ID NO: 7589 - protein, 7 aa, synthetic construct
  REGION 1..7: note = n-mer motif
DLTRAAI

SEQ ID NO: 7590 - protein, 7 aa, synthetic construct
  REGION 1..7: note = n-mer motif
VAMGGGP

SEQ ID NO: 7591 - protein, 7 aa, synthetic construct
  REGION 1..7: note = n-mer motif
AYGIREV

SEQ ID NO: 7592 - protein, 7 aa, synthetic construct
  REGION 1..7: note = n-mer motif
TSDGLLS

SEQ ID NO: 7593 - protein, 7 aa, synthetic construct
  REGION 1..7: note = n-mer motif
TMATNLS

SEQ ID NO: 7594 - protein, 7 aa, synthetic construct
  REGION 1..7: note = n-mer motif
NNGNSSR

SEQ ID NO: 7595 - protein, 7 aa, synthetic construct
  REGION 1..7: note = n-mer motif
TEKASPL

SEQ ID NO: 7596 - protein, 7 aa, synthetic construct
  REGION 1..7: note = n-mer motif
LNHTMPL

SEQ ID NO: 7597 - protein, 7 aa, synthetic construct
  REGION 1..7: note = n-mer motif
DTASYNN

SEQ ID NO: 7598 - protein, 7 aa, synthetic construct
  REGION 1..7: note = n-mer motif
NMTNERL

SEQ ID NO: 7599 - protein, 7 aa, synthetic construct
  REGION 1..7: note = n-mer motif
VVSSGGW

SEQ ID NO: 7600 - protein, 7 aa, synthetic construct
  REGION 1..7: note = n-mer motif
VNQSPGA

SEQ ID NO: 7601 - protein, 7 aa, synthetic construct
  REGION 1..7: note = n-mer motif
DHHPQSR

SEQ ID NO: 7602 - protein, 7 aa, synthetic construct
  REGION 1..7: note = n-mer motif
RWQGLSA

SEQ ID NO: 7603 - protein, 7 aa, synthetic construct
  REGION 1..7: note = n-mer motif
AVTTSVR

SEQ ID NO: 7604 - protein, 7 aa, synthetic construct
  REGION 1..7: note = n-mer motif
WGVSNSA

SEQ ID NO: 7605 - protein, 7 aa, synthetic construct
  REGION 1..7: note = n-mer motif
AHMHSEL

SEQ ID NO: 7606 - protein, 7 aa, synthetic construct
  REGION 1..7: note = n-mer motif
NNLTNST

SEQ ID NO: 7607 - protein, 7 aa, synthetic construct
  REGION 1..7: note = n-mer motif
SSGGMKA

SEQ ID NO: 7608 - protein, 7 aa, synthetic construct
  REGION 1..7: note = n-mer motif
VGYGEHV

SEQ ID NO: 7609 - protein, 7 aa, synthetic construct
  REGION 1..7: note = n-mer motif
TIVSTSY

SEQ ID NO: 7610 - protein, 7 aa, synthetic construct
  REGION 1..7: note = n-mer motif
PTSHQEP

SEQ ID NO: 7611 - protein, 7 aa, synthetic construct
  REGION 1..7: note = n-mer motif
SNLRNTI

SEQ ID NO: 7612 - protein, 7 aa, synthetic construct
  REGION 1..7: note = n-mer motif
SRHDVRN

SEQ ID NO: 7613 - protein, 7 aa, synthetic construct
  REGION 1..7: note = n-mer motif
QMNIHDK

SEQ ID NO: 7614 - protein, 7 aa, synthetic construct
  REGION 1..7: note = n-mer motif
WAMNNVP

SEQ ID NO: 7615 - protein, 7 aa, synthetic construct
  REGION 1..7: note = n-mer motif
AMDGYRV

SEQ ID NO: 7616 - protein, 7 aa, synthetic construct
  REGION 1..7: note = n-mer motif
KGGNLTA

SEQ ID NO: 7617 - protein, 7 aa, synthetic construct
  REGION 1..7: note = n-mer motif
IGKDSVP

SEQ ID NO: 7618 - protein, 7 aa, synthetic construct
  REGION 1..7: note = n-mer motif
VQLTHNG

SEQ ID NO: 7619 - protein, 7 aa, synthetic construct
  REGION 1..7: note = n-mer motif
GLNQITS

SEQ ID NO: 7620 - protein, 7 aa, synthetic construct
  REGION 1..7: note = n-mer motif
RGDPSTP

SEQ ID NO: 7621 - protein, 7 aa, synthetic construct
  REGION 1..7: note = n-mer motif
VPSDPHW

SEQ ID NO: 7622 - protein, 7 aa, synthetic construct
  REGION 1..7: note = n-mer motif
TLSSQVT

SEQ ID NO: 7623 - protein, 7 aa, synthetic construct
  REGION 1..7: note = n-mer motif
NQRVEQK

SEQ ID NO: 7624 - protein, 7 aa, synthetic construct
  REGION 1..7: note = n-mer motif
VLPSRIA

SEQ ID NO: 7625 - protein, 7 aa, synthetic construct
  REGION 1..7: note = n-mer motif
GHYATNT

SEQ ID NO: 7626 - protein, 7 aa, synthetic construct
  REGION 1..7: note = n-mer motif
PSIPSFS

SEQ ID NO: 7627 - protein, 7 aa, synthetic construct
  REGION 1..7: note = n-mer motif
TYEYPTR

SEQ ID NO: 7628 - protein, 7 aa, synthetic construct
  REGION 1..7: note = n-mer motif
KDHILSL

SEQ ID NO: 7629 - protein, 7 aa, synthetic construct
  REGION 1..7: note = n-mer motif
GTGGNRE

SEQ ID NO: 7630 - protein, 7 aa, synthetic construct
  REGION 1..7: note = n-mer motif
KGDGAYE

SEQ ID NO: 7631 - protein, 7 aa, synthetic construct
  REGION 1..7: note = n-mer motif
SSFGKDN

SEQ ID NO: 7632 - protein, 7 aa, synthetic construct
  REGION 1..7: note = n-mer motif
TVSSYVQ

SEQ ID NO: 7633 - protein, 7 aa, synthetic construct
  REGION 1..7: note = n-mer motif
RAHGDNQ

SEQ ID NO: 7634 - protein, 7 aa, synthetic construct
  REGION 1..7: note = n-mer motif
YHAHSNE

SEQ ID NO: 7635 - protein, 7 aa, synthetic construct
  REGION 1..7: note = n-mer motif
ANLPSGH

SEQ ID NO: 7636 - protein, 7 aa, synthetic construct
  REGION 1..7: note = n-mer motif
ANLNLTS

SEQ ID NO: 7637 - protein, 7 aa, synthetic construct
  REGION 1..7: note = n-mer motif
RLNAGEH

SEQ ID NO: 7638 - protein, 7 aa, synthetic construct
  REGION 1..7: note = n-mer motif
YVDYSKS

SEQ ID NO: 7639 - protein, 7 aa, synthetic construct
  REGION 1..7: note = n-mer motif
ANSGLHN

SEQ ID NO: 7640 - protein, 7 aa, synthetic construct
  REGION 1..7: note = n-mer motif
TSGVLTR

SEQ ID NO: 7641 - protein, 7 aa, synthetic construct
  REGION 1..7: note = n-mer motif
GKPAQEF

SEQ ID NO: 7642 - protein, 7 aa, synthetic construct
  REGION 1..7: note = n-mer motif
VGTHLHS

SEQ ID NO: 7643 - protein, 7 aa, synthetic construct
  REGION 1..7: note = n-mer motif
PMNKDIL

SEQ ID NO: 7644 - protein, 7 aa, synthetic construct
  REGION 1..7: note = n-mer motif
DAHHSSS

SEQ ID NO: 7645 - protein, 7 aa, synthetic construct
  REGION 1..7: note = n-mer motif
TNAISQT

SEQ ID NO: 7646 - protein, 7 aa, synthetic construct
  REGION 1..7: note = n-mer motif
VLSDKAY

SEQ ID NO: 7647 - protein, 7 aa, synthetic construct
  REGION 1..7: note = n-mer motif
NLLVDQR

SEQ ID NO: 7648 - protein, 7 aa, synthetic construct
  REGION 1..7: note = n-mer motif
TGHPPAA

SEQ ID NO: 7649 - protein, 7 aa, synthetic construct
  REGION 1..7: note = n-mer motif
ISSGILS

SEQ ID NO: 7650 - protein, 7 aa, synthetic construct
  REGION 1..7: note = n-mer motif
NTNLLGY

SEQ ID NO: 7651 - protein, 7 aa, synthetic construct
  REGION 1..7: note = n-mer motif
TLSVTLG

SEQ ID NO: 7652 - protein, 7 aa, synthetic construct
  REGION 1..7: note = n-mer motif
HTGVQTN

SEQ ID NO: 7653 - protein, 7 aa, synthetic construct
  REGION 1..7: note = n-mer motif
EVSNNNY

SEQ ID NO: 7654 - protein, 7 aa, synthetic construct
  REGION 1..7: note = n-mer motif
LANISLY

SEQ ID NO: 7655 - protein, 7 aa, synthetic construct
  REGION 1..7: note = n-mer motif
VEHVAHQ

SEQ ID NO: 7656 - protein, 7 aa, synthetic construct
  REGION 1..7: note = n-mer motif
VDKSEAD

SEQ ID NO: 7657 - protein, 7 aa, synthetic construct
  REGION 1..7: note = n-mer motif
GFALTGT

SEQ ID NO: 7658 - protein, 7 aa, synthetic construct
  REGION 1..7: note = n-mer motif
LLTAPHR

SEQ ID NO: 7659 - protein, 7 aa, synthetic construct
  REGION 1..7: note = n-mer motif
NAGALMG

SEQ ID NO: 7660 - protein, 7 aa, synthetic construct
  REGION 1..7: note = n-mer motif
RTQAGDS

SEQ ID NO: 7661 - protein, 7 aa, synthetic construct
  REGION 1..7: note = n-mer motif
NTHRQEY

SEQ ID NO: 7662 - protein, 7 aa, synthetic construct
  REGION 1..7: note = n-mer motif
NIAGGEQ

SEQ ID NO: 7663 - protein, 7 aa, synthetic construct
  REGION 1..7: note = n-mer motif
EINNRTG

SEQ ID NO: 7664 - protein, 7 aa, synthetic construct
  REGION 1..7: note = n-mer motif
TVNTMYT

SEQ ID NO: 7665 - protein, 7 aa, synthetic construct
  REGION 1..7: note = n-mer motif
PMNGILL

SEQ ID NO: 7666 - protein, 7 aa, synthetic construct
  REGION 1..7: note = n-mer motif
NPSYDHR

SEQ ID NO: 7667 - protein, 7 aa, synthetic construct
  REGION 1..7: note = n-mer motif
AVILNPV

SEQ ID NO: 7668 - protein, 7 aa, synthetic construct
  REGION 1..7: note = n-mer motif
LYGGAHQ

SEQ ID NO: 7669 - protein, 7 aa, synthetic construct
  REGION 1..7: note = n-mer motif
QVNQPRI

SEQ ID NO: 7670 - protein, 7 aa, synthetic construct
  REGION 1..7: note = n-mer motif
AVRTPAM

SEQ ID NO: 7671 - protein, 7 aa, synthetic construct
  REGION 1..7: note = n-mer motif
SLTPNNL

SEQ ID NO: 7672 - protein, 7 aa, synthetic construct
  REGION 1..7: note = n-mer motif
LGQVNST

SEQ ID NO: 7673 - protein, 7 aa, synthetic construct
  REGION 1..7: note = n-mer motif
ANSATNQ

SEQ ID NO: 7674 - protein, 7 aa, synthetic construct
  REGION 1..7: note = n-mer motif
SLTEKAP

SEQ ID NO: 7675 - protein, 7 aa, synthetic construct
  REGION 1..7: note = n-mer motif
QFHGTSE

SEQ ID NO: 7676 - protein, 7 aa, synthetic construct
  REGION 1..7: note = n-mer motif
KNGAIGT

SEQ ID NO: 7677 - protein, 7 aa, synthetic construct
  REGION 1..7: note = n-mer motif
VLASTEK

SEQ ID NO: 7678 - protein, 7 aa, synthetic construct
  REGION 1..7: note = n-mer motif
SNMSEAI

SEQ ID NO: 7679 - protein, 7 aa, synthetic construct
  REGION 1..7: note = n-mer motif
NANAGGN

SEQ ID NO: 7680 - protein, 7 aa, synthetic construct
  REGION 1..7: note = n-mer motif
HSNTHYE

SEQ ID NO: 7681 - protein, 7 aa, synthetic construct
  REGION 1..7: note = n-mer motif
SALISVV

SEQ ID NO: 7682 - protein, 7 aa, synthetic construct
  REGION 1..7: note = n-mer motif
VATHYNE

SEQ ID NO: 7683 - protein, 7 aa, synthetic construct
  REGION 1..7: note = n-mer motif
NQTLQVD

SEQ ID NO: 7684 - protein, 7 aa, synthetic construct
  REGION 1..7: note = n-mer motif
KTPSASE

SEQ ID NO: 7685 - protein, 7 aa, synthetic construct
  REGION 1..7: note = n-mer motif
GESRTNM

SEQ ID NO: 7686 - protein, 7 aa, synthetic construct
  REGION 1..7: note = n-mer motif
RNEPVST

SEQ ID NO: 7687 - protein, 7 aa, synthetic construct
  REGION 1..7: note = n-mer motif
ATHAMRP

SEQ ID NO: 7688 - protein, 7 aa, synthetic construct
  REGION 1..7: note = n-mer motif
WESLSNA

SEQ ID NO: 7689 - protein, 7 aa, synthetic construct
  REGION 1..7: note = n-mer motif
HSPPTTM

SEQ ID NO: 7690 - protein, 7 aa, synthetic construct
  REGION 1..7: note = n-mer motif
STMNTIT

SEQ ID NO: 7691 - protein, 7 aa, synthetic construct
  REGION 1..7: note = n-mer motif
NMEHTMA

SEQ ID NO: 7692 - protein, 7 aa, synthetic construct
  REGION 1..7: note = n-mer motif
HNTESKT

SEQ ID NO: 7693 - protein, 7 aa, synthetic construct
  REGION 1..7: note = n-mer motif
HNLMTQI

SEQ ID NO: 7694 - protein, 7 aa, synthetic construct
  REGION 1..7: note = n-mer motif
NQNTYEL

SEQ ID NO: 7695 - protein, 7 aa, synthetic construct
  REGION 1..7: note = n-mer motif
YATLDTI

SEQ ID NO: 7696 - protein, 7 aa, synthetic construct
  REGION 1..7: note = n-mer motif
VQLENAN

SEQ ID NO: 7697 - protein, 7 aa, synthetic construct
  REGION 1..7: note = n-mer motif
GLTGYTM

SEQ ID NO: 7698 - protein, 7 aa, synthetic construct
  REGION 1..7: note = n-mer motif
LVLDSRN

SEQ ID NO: 7699 - protein, 7 aa, synthetic construct
  REGION 1..7: note = n-mer motif
MLVQNTP

SEQ ID NO: 7700 - protein, 7 aa, synthetic construct
  REGION 1..7: note = n-mer motif
PHNQEMG

SEQ ID NO: 7701 - protein, 7 aa, synthetic construct
  REGION 1..7: note = n-mer motif
SLGDAML

SEQ ID NO: 7702 - protein, 7 aa, synthetic construct
  REGION 1..7: note = n-mer motif
RAEGSSG

SEQ ID NO: 7703 - protein, 7 aa, synthetic construct
  REGION 1..7: note = n-mer motif
SEERTRA

SEQ ID NO: 7704 - protein, 7 aa, synthetic construct
  REGION 1..7: note = n-mer motif
SSKERTS

SEQ ID NO: 7705 - protein, 7 aa, synthetic construct
  REGION 1..7: note = n-mer motif
PVVRDRS

SEQ ID NO: 7706 - protein, 7 aa, synthetic construct
  REGION 1..7: note = n-mer motif
RMSESSD

SEQ ID NO: 7707 - protein, 7 aa, synthetic construct
  REGION 1..7: note = n-mer motif
NQSISMD

SEQ ID NO: 7708 - protein, 7 aa, synthetic construct
  REGION 1..7: note = n-mer motif
VAVSNTP

SEQ ID NO: 7709 - protein, 7 aa, synthetic construct
  REGION 1..7: note = n-mer motif
GDISSRN

SEQ ID NO: 7710 - protein, 7 aa, synthetic construct
  REGION 1..7: note = n-mer motif
AAGADSP

SEQ ID NO: 7711 - protein, 7 aa, synthetic construct
  REGION 1..7: note = n-mer motif
FGTSYTT

SEQ ID NO: 7712 - protein, 7 aa, synthetic construct
  REGION 1..7: note = n-mer motif
RDTNTDK

SEQ ID NO: 7713 - protein, 7 aa, synthetic construct
  REGION 1..7: note = n-mer motif
GSTPGAS

SEQ ID NO: 7714 - protein, 7 aa, synthetic construct
  REGION 1..7: note = n-mer motif
GTNHDFS

SEQ ID NO: 7715 - protein, 7 aa, synthetic construct
  REGION 1..7: note = n-mer motif
NESTKES

SEQ ID NO: 7716 - protein, 7 aa, synthetic construct
  REGION 1..7: note = n-mer motif
VHVTNVL

SEQ ID NO: 7717 - protein, 7 aa, synthetic construct
  REGION 1..7: note = n-mer motif
STTNVAY

SEQ ID NO: 7718 - protein, 7 aa, synthetic construct
  REGION 1..7: note = n-mer motif
ITSLNGM

SEQ ID NO: 7719 - protein, 7 aa, synthetic construct
  REGION 1..7: note = n-mer motif
EVRGSVP

SEQ ID NO: 7720 - protein, 7 aa, synthetic construct
  REGION 1..7: note = n-mer motif
ALTRMPN

SEQ ID NO: 7721 - protein, 7 aa, synthetic construct
  REGION 1..7: note = n-mer motif
LSVADRP

SEQ ID NO: 7722 - protein, 7 aa, synthetic construct
  REGION 1..7: note = n-mer motif
VSTAQRQ

SEQ ID NO: 7723 - protein, 7 aa, synthetic construct
  REGION 1..7: note = n-mer motif
LNAEYTN

SEQ ID NO: 7724 - protein, 7 aa, synthetic construct
  REGION 1..7: note = n-mer motif
NEKPQST

SEQ ID NO: 7725 - protein, 7 aa, synthetic construct
  REGION 1..7: note = n-mer motif
LNTLIDK

SEQ ID NO: 7726 - protein, 7 aa, synthetic construct
  REGION 1..7: note = n-mer motif
VTHTLIE

SEQ ID NO: 7727 - protein, 7 aa, synthetic construct
  REGION 1..7: note = n-mer motif
EQKKTDH

SEQ ID NO: 7728 - protein, 7 aa, synthetic construct
  REGION 1..7: note = n-mer motif
TSGMYDT

SEQ ID NO: 7729 - protein, 7 aa, synthetic construct
  REGION 1..7: note = n-mer motif
PDAARSP

SEQ ID NO: 7730 - protein, 7 aa, synthetic construct
  REGION 1..7: note = n-mer motif
LTQVYHE

SEQ ID NO: 7731 - protein, 7 aa, synthetic construct
  REGION 1..7: note = n-mer motif
REMSSLS

SEQ ID NO: 7732 - protein, 7 aa, synthetic construct
  REGION 1..7: note = n-mer motif
MPSKGEV

SEQ ID NO: 7733 - protein, 7 aa, synthetic construct
  REGION 1..7: note = n-mer motif
NEQNTPS

SEQ ID NO: 7734 - protein, 7 aa, synthetic construct
  REGION 1..7: note = n-mer motif
KNYASTD

SEQ ID NO: 7735 - protein, 7 aa, synthetic construct
  REGION 1..7: note = n-mer motif
CMDVGKA

SEQ ID NO: 7736 - protein, 7 aa, synthetic construct
  REGION 1..7: note = n-mer motif
ALHNLMN

SEQ ID NO: 7737 - protein, 7 aa, synthetic construct
  REGION 1..7: note = n-mer motif
PDRANDK

SEQ ID NO: 7738 - protein, 7 aa, synthetic construct
  REGION 1..7: note = n-mer motif
IAHVSTN

SEQ ID NO: 7739 - protein, 7 aa, synthetic construct
  REGION 1..7: note = n-mer motif
NGPTGSA

SEQ ID NO: 7740 - protein, 7 aa, synthetic construct
  REGION 1..7: note = n-mer motif
STHHADR

SEQ ID NO: 7741 - protein, 7 aa, synthetic construct
  REGION 1..7: note = n-mer motif
GSQYGRH

SEQ ID NO: 7742 - protein, 7 aa, synthetic construct
  REGION 1..7: note = n-mer motif
TGTATLP

SEQ ID NO: 7743 - protein, 7 aa, synthetic construct
  REGION 1..7: note = n-mer motif
KAHVVEI

SEQ ID NO: 7744 - protein, 7 aa, synthetic construct
  REGION 1..7: note = n-mer motif
TSQGRSP

SEQ ID NO: 7745 - protein, 7 aa, synthetic construct
  REGION 1..7: note = n-mer motif
LSSESPR

SEQ ID NO: 7746 - protein, 7 aa, synthetic construct
  REGION 1..7: note = n-mer motif
TGVRETI

SEQ ID NO: 7747 - protein, 7 aa, synthetic construct
  REGION 1..7: note = n-mer motif
MDTELYR

SEQ ID NO: 7748 - protein, 7 aa, synthetic construct
  REGION 1..7: note = n-mer motif
TPEASAR

SEQ ID NO: 7749 - protein, 7 aa, synthetic construct
  REGION 1..7: note = n-mer motif
HDLNHGK

SEQ ID NO: 7750 - protein, 7 aa, synthetic construct
  REGION 1..7: note = n-mer motif
LTGQNAI

SEQ ID NO: 7751 - protein, 7 aa, synthetic construct
  REGION 1..7: note = n-mer motif
TVGSNSI

SEQ ID NO: 7752 - protein, 7 aa, synthetic construct
  REGION 1..7: note = n-mer motif
HTVGAMH

SEQ ID NO: 7753 - protein, 7 aa, synthetic construct
  REGION 1..7: note = n-mer motif
ERVNGMA

SEQ ID NO: 7754 - protein, 7 aa, synthetic construct
  REGION 1..7: note = n-mer motif
SEPLRVG

SEQ ID NO: 7755 - protein, 7 aa, synthetic construct
  REGION 1..7: note = n-mer motif
VSNVLYS

SEQ ID NO: 7756 - protein, 7 aa, synthetic construct
  REGION 1..7: note = n-mer motif
FSSGTTI

SEQ ID NO: 7757 - protein, 7 aa, synthetic construct
  REGION 1..7: note = n-mer motif
TNLSQSA

SEQ ID NO: 7758 - protein, 7 aa, synthetic construct
  REGION 1..7: note = n-mer motif
PNTASNF

SEQ ID NO: 7759 - protein, 7 aa, synthetic construct
  REGION 1..7: note = n-mer motif
CGLNCGK

SEQ ID NO: 7760 - protein, 7 aa, synthetic construct
  REGION 1..7: note = n-mer motif
PTGGSPP

SEQ ID NO: 7761 - protein, 7 aa, synthetic construct
  REGION 1..7: note = n-mer motif
YLESNYT

SEQ ID NO: 7762 - protein, 7 aa, synthetic construct
  REGION 1..7: note = n-mer motif
TLETTRS

SEQ ID NO: 7763 - protein, 7 aa, synthetic construct
  REGION 1..7: note = n-mer motif
SANEHNH

SEQ ID NO: 7764 - protein, 7 aa, synthetic construct
  REGION 1..7: note = n-mer motif
ARVDTNQ

SEQ ID NO: 7765 - protein, 7 aa, synthetic construct
  REGION 1..7: note = n-mer motif
NVVKNNT

SEQ ID NO: 7766 - protein, 7 aa, synthetic construct
  REGION 1..7: note = n-mer motif
GSYSDGS

SEQ ID NO: 7767 - protein, 7 aa, synthetic construct
  REGION 1..7: note = n-mer motif
PGNGQSP

SEQ ID NO: 7768 - protein, 7 aa, synthetic construct
  REGION 1..7: note = n-mer motif
SGVNFGV

SEQ ID NO: 7769 - protein, 7 aa, synthetic construct
  REGION 1..7: note = n-mer motif
RINAAID

SEQ ID NO: 7770 - protein, 7 aa, synthetic construct
  REGION 1..7: note = n-mer motif
QAGNAPR

SEQ ID NO: 7771 - protein, 7 aa, synthetic construct
  REGION 1..7: note = n-mer motif
QSGSLVP

SEQ ID NO: 7772 - protein, 7 aa, synthetic construct
  REGION 1..7: note = n-mer motif
FSTQDIS

SEQ ID NO: 7773 - protein, 7 aa, synthetic construct
  REGION 1..7: note = n-mer motif
VNPHPAQ

SEQ ID NO: 7774 - protein, 7 aa, synthetic construct
  REGION 1..7: note = n-mer motif
KGHAYEA

SEQ ID NO: 7775 - protein, 7 aa, synthetic construct
  REGION 1..7: note = n-mer motif
EDSMRFS

SEQ ID NO: 7776 - protein, 7 aa, synthetic construct
  REGION 1..7: note = n-mer motif
GRNESPE

SEQ ID NO: 7777 - protein, 7 aa, synthetic construct
  REGION 1..7: note = n-mer motif
SDGSKLL

SEQ ID NO: 7778 - protein, 7 aa, synthetic construct
  REGION 1..7: note = n-mer motif
TLSGYMR

SEQ ID NO: 7779 - protein, 7 aa, synthetic construct
  REGION 1..7: note = n-mer motif
DIHNPRT

SEQ ID NO: 7780 - protein, 7 aa, synthetic construct
  REGION 1..7: note = n-mer motif
WAKDVNV

SEQ ID NO: 7781 - protein, 7 aa, synthetic construct
  REGION 1..7: note = n-mer motif
AVGRSDD

SEQ ID NO: 7782 - protein, 7 aa, synthetic construct
  REGION 1..7: note = n-mer motif
KEKTTRE

SEQ ID NO: 7783 - protein, 7 aa, synthetic construct
  REGION 1..7: note = n-mer motif
LLQSTYL

SEQ ID NO: 7784 - protein, 7 aa, synthetic construct
  REGION 1..7: note = n-mer motif
KSNLEGK

SEQ ID NO: 7785 - protein, 7 aa, synthetic construct
  REGION 1..7: note = n-mer motif
TRTPFLG

SEQ ID NO: 7786 - protein, 7 aa, synthetic construct
  REGION 1..7: note = n-mer motif
QSDTTSI

SEQ ID NO: 7787 - protein, 7 aa, synthetic construct
  REGION 1..7: note = n-mer motif
AWSQVLT

SEQ ID NO: 7788 - protein, 7 aa, synthetic construct
  REGION 1..7: note = n-mer motif
TQERPLI

SEQ ID NO: 7789 - protein, 7 aa, synthetic construct
  REGION 1..7: note = n-mer motif
DDKTGRY

SEQ ID NO: 7790 - protein, 7 aa, synthetic construct
  REGION 1..7: note = n-mer motif
FPSHNGA

SEQ ID NO: 7791 - protein, 7 aa, synthetic construct
  REGION 1..7: note = n-mer motif
MLSQVLT

SEQ ID NO: 7792 - protein, 7 aa, synthetic construct
  REGION 1..7: note = n-mer motif
SVTTNLM

SEQ ID NO: 7793 - protein, 7 aa, synthetic construct
  REGION 1..7: note = n-mer motif
EHNSKTY

SEQ ID NO: 7794 - protein, 7 aa, synthetic construct
  REGION 1..7: note = n-mer motif
YAHPVTH

SEQ ID NO: 7795 - protein, 7 aa, synthetic construct
  REGION 1..7: note = n-mer motif
PNPSPRQ

SEQ ID NO: 7796 - protein, 7 aa, synthetic construct
  REGION 1..7: note = n-mer motif
HMGLNEL

SEQ ID NO: 7797 - protein, 7 aa, synthetic construct
  REGION 1..7: note = n-mer motif
NSLQASA

SEQ ID NO: 7798 - protein, 7 aa, synthetic construct
  REGION 1..7: note = n-mer motif
DLGTART

SEQ ID NO: 7799 - protein, 7 aa, synthetic construct
  REGION 1..7: note = n-mer motif
YDSRLYA

SEQ ID NO: 7800 - protein, 7 aa, synthetic construct
  REGION 1..7: note = n-mer motif
PKPGTGE

SEQ ID NO: 7801 - protein, 7 aa, synthetic construct
  REGION 1..7: note = n-mer motif
SLNGVLV

SEQ ID NO: 7802 - protein, 7 aa, synthetic construct
  REGION 1..7: note = n-mer motif
QSNLVIN

SEQ ID NO: 7803 - protein, 7 aa, synthetic construct
  REGION 1..7: note = n-mer motif
ASPAQTG

SEQ ID NO: 7804 - protein, 7 aa, synthetic construct
  REGION 1..7: note = n-mer motif
NMTNENG

SEQ ID NO: 7805 - protein, 7 aa, synthetic construct
  REGION 1..7: note = n-mer motif
SLRTDEF

SEQ ID NO: 7806 - protein, 7 aa, synthetic construct
  REGION 1..7: note = n-mer motif
ILDNHRF

SEQ ID NO: 7807 - protein, 7 aa, synthetic construct
  REGION 1..7: note = n-mer motif
LINMSQN

SEQ ID NO: 7808 - protein, 7 aa, synthetic construct
  REGION 1..7: note = n-mer motif
PQDVRQT

SEQ ID NO: 7809 - protein, 7 aa, synthetic construct
  REGION 1..7: note = n-mer motif
PFVANEP

SEQ ID NO: 7810 - protein, 7 aa, synthetic construct
  REGION 1..7: note = n-mer motif
NINDTKN

SEQ ID NO: 7811 - protein, 7 aa, synthetic construct
  REGION 1..7: note = n-mer motif
NFSSGDV

SEQ ID NO: 7812 - protein, 7 aa, synthetic construct
  REGION 1..7: note = n-mer motif
ERNGLIE

SEQ ID NO: 7813 - protein, 7 aa, synthetic construct
  REGION 1..7: note = n-mer motif
NSHVPNN

SEQ ID NO: 7814 - protein, 7 aa, synthetic construct
  REGION 1..7: note = n-mer motif
NTTGSSG

SEQ ID NO: 7815 - protein, 7 aa, synthetic construct
  REGION 1..7: note = n-mer motif
STRKEHD

SEQ ID NO: 7816 - protein, 7 aa, synthetic construct
  REGION 1..7: note = n-mer motif
AANPSTE

SEQ ID NO: 7817 - protein, 7 aa, synthetic construct
  REGION 1..7: note = n-mer motif
SGMNSNK

SEQ ID NO: 7818 - protein, 7 aa, synthetic construct
  REGION 1..7: note = n-mer motif
KTLDNNA

SEQ ID NO: 7819 - protein, 7 aa, synthetic construct
  REGION 1..7: note = n-mer motif
TVKQTSP

SEQ ID NO: 7820 - protein, 7 aa, synthetic construct
  REGION 1..7: note = n-mer motif
ISQVSFN

SEQ ID NO: 7821 - protein, 7 aa, synthetic construct
  REGION 1..7: note = n-mer motif
LEVNLQT

SEQ ID NO: 7822 - protein, 7 aa, synthetic construct
  REGION 1..7: note = n-mer motif
EMQTKNA

SEQ ID NO: 7823 - protein, 7 aa, synthetic construct
  REGION 1..7: note = n-mer motif
ADNRNDK

SEQ ID NO: 7824 - protein, 7 aa, synthetic construct
  REGION 1..7: note = n-mer motif
AYDTLNS

SEQ ID NO: 7825 - protein, 7 aa, synthetic construct
  REGION 1..7: note = n-mer motif
TIQDHIK

SEQ ID NO: 7826 - protein, 7 aa, synthetic construct
  REGION 1..7: note = n-mer motif
DPTKVGS

SEQ ID NO: 7827 - protein, 7 aa, synthetic construct
  REGION 1..7: note = n-mer motif
SLQRTPD

SEQ ID NO: 7828 - protein, 7 aa, synthetic construct
  REGION 1..7: note = n-mer motif
ANDSAKT

SEQ ID NO: 7829 - protein, 7 aa, synthetic construct
  REGION 1..7: note = n-mer motif
KKVEQEP

SEQ ID NO: 7830 - protein, 7 aa, synthetic construct
  REGION 1..7: note = n-mer motif
ASRDLGQ

SEQ ID NO: 7831 - protein, 7 aa, synthetic construct
  REGION 1..7: note = n-mer motif
WESDKFR

SEQ ID NO: 7832 - protein, 7 aa, synthetic construct
  REGION 1..7: note = n-mer motif
NRGTEVY

SEQ ID NO: 7833 - protein, 7 aa, synthetic construct
  REGION 1..7: note = n-mer motif
NISSINQ

SEQ ID NO: 7834 - protein, 7 aa, synthetic construct
  REGION 1..7: note = n-mer motif
ASKGFGH

SEQ ID NO: 7835 - protein, 7 aa, synthetic construct
  REGION 1..7: note = n-mer motif
QSQNVTQ

SEQ ID NO: 7836 - protein, 7 aa, synthetic construct
  REGION 1..7: note = n-mer motif
NGYQLQI

SEQ ID NO: 7837 - protein, 7 aa, synthetic construct
  REGION 1..7: note = n-mer motif
CTNASDL

SEQ ID NO: 7838 - protein, 7 aa, synthetic construct
  REGION 1..7: note = n-mer motif
TVASPNT

SEQ ID NO: 7839 - protein, 7 aa, synthetic construct
  REGION 1..7: note = n-mer motif
NTAPPNH

SEQ ID NO: 7840 - protein, 7 aa, synthetic construct
  REGION 1..7: note = n-mer motif
LSQQRDY

SEQ ID NO: 7841 - protein, 7 aa, synthetic construct
  REGION 1..7: note = n-mer motif
WNQNVSH

SEQ ID NO: 7842 - protein, 7 aa, synthetic construct
  REGION 1..7: note = n-mer motif
TGSSDRL

SEQ ID NO: 7843 - protein, 7 aa, synthetic construct
  REGION 1..7: note = n-mer motif
NTTPPNH

SEQ ID NO: 7844 - protein, 7 aa, synthetic construct
  REGION 1..7: note = n-mer motif
VVDSTYP

SEQ ID NO: 7845 - protein, 7 aa, synthetic construct
  REGION 1..7: note = n-mer motif
TDATGRH

SEQ ID NO: 7846 - protein, 7 aa, synthetic construct
  REGION 1..7: note = n-mer motif
LFTAGST

SEQ ID NO: 7847 - protein, 7 aa, synthetic construct
  REGION 1..7: note = n-mer motif
LRDQTSM

SEQ ID NO: 7848 - protein, 7 aa, synthetic construct
  REGION 1..7: note = n-mer motif
IETDRHR

SEQ ID NO: 7849 - protein, 7 aa, synthetic construct
  REGION 1..7: note = n-mer motif
SGPENTL

SEQ ID NO: 7850 - protein, 7 aa, synthetic construct
  REGION 1..7: note = n-mer motif
DNQNADR

SEQ ID NO: 7851 - protein, 7 aa, synthetic construct
  REGION 1..7: note = n-mer motif
HDGYVPN

SEQ ID NO: 7852 - protein, 7 aa, synthetic construct
  REGION 1..7: note = n-mer motif
HMSSYSS

SEQ ID NO: 7853 - protein, 7 aa, synthetic construct
  REGION 1..7: note = n-mer motif
SRLQTQQ

SEQ ID NO: 7854 - protein, 7 aa, synthetic construct
  REGION 1..7: note = n-mer motif
SYTAGRP

SEQ ID NO: 7855 - protein, 7 aa, synthetic construct
  REGION 1..7: note = n-mer motif
VQQNNIN

SEQ ID NO: 7856 - protein, 7 aa, synthetic construct
  REGION 1..7: note = n-mer motif
DAKALTT

SEQ ID NO: 7857 - protein, 7 aa, synthetic construct
  REGION 1..7: note = n-mer motif
KDEHLHY

SEQ ID NO: 7858 - protein, 7 aa, synthetic construct
  REGION 1..7: note = n-mer motif
HGDRTAL

SEQ ID NO: 7859 - protein, 7 aa, synthetic construct
  REGION 1..7: note = n-mer motif
NFTITEA

SEQ ID NO: 7860 - protein, 7 aa, synthetic construct
  REGION 1..7: note = n-mer motif
DTHMNKL

SEQ ID NO: 7861 - protein, 7 aa, synthetic construct
  REGION 1..7: note = n-mer motif
QPGAPQT

SEQ ID NO: 7862 - protein, 7 aa, synthetic construct
  REGION 1..7: note = n-mer motif
GEARREA

SEQ ID NO: 7863 - protein, 7 aa, synthetic construct
  REGION 1..7: note = n-mer motif
KSLSSDD

SEQ ID NO: 7864 - protein, 7 aa, synthetic construct
  REGION 1..7: note = n-mer motif
MNTTYNE

SEQ ID NO: 7865 - protein, 7 aa, synthetic construct
  REGION 1..7: note = n-mer motif
AAALETI

SEQ ID NO: 7866 - protein, 7 aa, synthetic construct
  REGION 1..7: note = n-mer motif
NVAPYSS

SEQ ID NO: 7867 - protein, 7 aa, synthetic construct
  REGION 1..7: note = n-mer motif
SAGMVSL

SEQ ID NO: 7868 - protein, 7 aa, synthetic construct
  REGION 1..7: note = n-mer motif
CDLSQSC

SEQ ID NO: 7869 - protein, 7 aa, synthetic construct
  REGION 1..7: note = n-mer motif
VLITMSS

SEQ ID NO: 7870 - protein, 7 aa, synthetic construct
  REGION 1..7: note = n-mer motif
QVGALMV

SEQ ID NO: 7871 - protein, 7 aa, synthetic construct
  REGION 1..7: note = n-mer motif
QRTSEAP

SEQ ID NO: 7872 - protein, 7 aa, synthetic construct
  REGION 1..7: note = n-mer motif
LGNGSSL

SEQ ID NO: 7873 - protein, 7 aa, synthetic construct
  REGION 1..7: note = n-mer motif
PSVRLPL

SEQ ID NO: 7874 - protein, 7 aa, synthetic construct
  REGION 1..7: note = n-mer motif
DSAPSTI

SEQ ID NO: 7875 - protein, 7 aa, synthetic construct
  REGION 1..7: note = n-mer motif
NYNGVNV

SEQ ID NO: 7876 - protein, 7 aa, synthetic construct
  REGION 1..7: note = n-mer motif
SAHQTPT

SEQ ID NO: 7877 - protein, 7 aa, synthetic construct
  REGION 1..7: note = n-mer motif
DHSKQIS

SEQ ID NO: 7878 - protein, 7 aa, synthetic construct
  REGION 1..7: note = n-mer motif
AASLSQS

SEQ ID NO: 7879 - protein, 7 aa, synthetic construct
  REGION 1..7: note = n-mer motif
HADVGMS

SEQ ID NO: 7880 - protein, 7 aa, synthetic construct
  REGION 1..7: note = n-mer motif
HVTVTLN

SEQ ID NO: 7881 - protein, 7 aa, synthetic construct
  REGION 1..7: note = n-mer motif
NSTHINS

SEQ ID NO: 7882 - protein, 7 aa, synthetic construct
  REGION 1..7: note = n-mer motif
LGLAGQV

SEQ ID NO: 7883 - protein, 7 aa, synthetic construct
  REGION 1..7: note = n-mer motif
SSQAHGP

SEQ ID NO: 7884 - protein, 7 aa, synthetic construct
  REGION 1..7: note = n-mer motif
AFKSGSI

SEQ ID NO: 7885 - protein, 7 aa, synthetic construct
  REGION 1..7: note = n-mer motif
HSPSHDS

SEQ ID NO: 7886 - protein, 7 aa, synthetic construct
  REGION 1..7: note = n-mer motif
PNGESSR

SEQ ID NO: 7887 - protein, 7 aa, synthetic construct
  REGION 1..7: note = n-mer motif
ILTPLDK

SEQ ID NO: 7888 - protein, 7 aa, synthetic construct
  REGION 1..7: note = n-mer motif
SASYSRM

SEQ ID NO: 7889 - protein, 7 aa, synthetic construct
  REGION 1..7: note = n-mer motif
EALHDRN

SEQ ID NO: 7890 - protein, 7 aa, synthetic construct
  REGION 1..7: note = n-mer motif
GEQHNAP

SEQ ID NO: 7891 - protein, 7 aa, synthetic construct
  REGION 1..7: note = n-mer motif
GNMVTPN

SEQ ID NO: 7892 - protein, 7 aa, synthetic construct
  REGION 1..7: note = n-mer motif
NALLNAP

SEQ ID NO: 7893 - protein, 7 aa, synthetic construct
  REGION 1..7: note = n-mer motif
ASDLQMT

SEQ ID NO: 7894 - protein, 7 aa, synthetic construct
  REGION 1..7: note = n-mer motif
SYDMHTN

SEQ ID NO: 7895 - protein, 7 aa, synthetic construct
  REGION 1..7: note = n-mer motif
NMSHSTL

SEQ ID NO: 7896 - protein, 7 aa, synthetic construct
  REGION 1..7: note = n-mer motif
TANNHSP

SEQ ID NO: 7897 - protein, 7 aa, synthetic construct
  REGION 1..7: note = n-mer motif
QAPPTAQ

SEQ ID NO: 7898 - protein, 7 aa, synthetic construct
  REGION 1..7: note = n-mer motif
NYHGDNV

SEQ ID NO: 7899 - protein, 7 aa, synthetic construct
  REGION 1..7: note = n-mer motif
RDSTISR

SEQ ID NO: 7900 - protein, 7 aa, synthetic construct
  REGION 1..7: note = n-mer motif
VSSPNGT

SEQ ID NO: 7901 - protein, 7 aa, synthetic construct
  REGION 1..7: note = n-mer motif
SRITVNA

SEQ ID NO: 7902 - protein, 7 aa, synthetic construct
  REGION 1..7: note = n-mer motif
VGTTSNG

SEQ ID NO: 7903 - protein, 7 aa, synthetic construct
  REGION 1..7: note = n-mer motif
HTNQMQP

SEQ ID NO: 7904 - protein, 7 aa, synthetic construct
  REGION 1..7: note = n-mer motif
KSNAGFG

SEQ ID NO: 7905 - protein, 7 aa, synthetic construct
  REGION 1..7: note = n-mer motif
KESLEDV

SEQ ID NO: 7906 - protein, 7 aa, synthetic construct
  REGION 1..7: note = n-mer motif
AQVNNHD

SEQ ID NO: 7907 - protein, 7 aa, synthetic construct
  REGION 1..7: note = n-mer motif
NASTYMD

SEQ ID NO: 7908 - protein, 7 aa, synthetic construct
  REGION 1..7: note = n-mer motif
TSDTNAR

SEQ ID NO: 7909 - protein, 7 aa, synthetic construct
  REGION 1..7: note = n-mer motif
ESRMRSI

SEQ ID NO: 7910 - protein, 7 aa, synthetic construct
  REGION 1..7: note = n-mer motif
RVEDTNS

SEQ ID NO: 7911 - protein, 7 aa, synthetic construct
  REGION 1..7: note = n-mer motif
ASNHLQA

SEQ ID NO: 7912 - protein, 7 aa, synthetic construct
  REGION 1..7: note = n-mer motif
RLHGSDS

SEQ ID NO: 7913 - protein, 7 aa, synthetic construct
  REGION 1..7: note = n-mer motif
TVEQINS

SEQ ID NO: 7914 - protein, 7 aa, synthetic construct
  REGION 1..7: note = n-mer motif
RSVPSPH

SEQ ID NO: 7915 - protein, 7 aa, synthetic construct
  REGION 1..7: note = n-mer motif
EYLALGH

SEQ ID NO: 7916 - protein, 7 aa, synthetic construct
  REGION 1..7: note = n-mer motif
NTNNQEQ

SEQ ID NO: 7917 - protein, 7 aa, synthetic construct
  REGION 1..7: note = n-mer motif
NYGSGRI

SEQ ID NO: 7918 - protein, 7 aa, synthetic construct
  REGION 1..7: note = n-mer motif
RHGDTPM

SEQ ID NO: 7919 - protein, 7 aa, synthetic construct
  REGION 1..7: note = n-mer motif
NDTIGRP

SEQ ID NO: 7920 - protein, 7 aa, synthetic construct
  REGION 1..7: note = n-mer motif
YGERART

SEQ ID NO: 7921 - protein, 7 aa, synthetic construct
  REGION 1..7: note = n-mer motif
VLGMQRS

SEQ ID NO: 7922 - protein, 7 aa, synthetic construct
  REGION 1..7: note = n-mer motif
LHFHASQ

SEQ ID NO: 7923 - protein, 7 aa, synthetic construct
  REGION 1..7: note = n-mer motif
TDTLSER

SEQ ID NO: 7924 - protein, 7 aa, synthetic construct
  REGION 1..7: note = n-mer motif
GTGTVGW

SEQ ID NO: 7925 - protein, 7 aa, synthetic construct
  REGION 1..7: note = n-mer motif
TESPKLL

SEQ ID NO: 7926 - protein, 7 aa, synthetic construct
  REGION 1..7: note = n-mer motif
TIRSEGF

SEQ ID NO: 7927 - protein, 7 aa, synthetic construct
  REGION 1..7: note = n-mer motif
ASSYINN

SEQ ID NO: 7928 - protein, 7 aa, synthetic construct
  REGION 1..7: note = n-mer motif
LHLGLSS

SEQ ID NO: 7929 - protein, 7 aa, synthetic construct
  REGION 1..7: note = n-mer motif
VTGTTPG

SEQ ID NO: 7930 - protein, 7 aa, synthetic construct
  REGION 1..7: note = n-mer motif
VTSSASG

SEQ ID NO: 7931 - protein, 7 aa, synthetic construct
  REGION 1..7: note = n-mer motif
QMHLHMQ

SEQ ID NO: 7932 - protein, 7 aa, synthetic construct
  REGION 1..7: note = n-mer motif
GTMSLLM

SEQ ID NO: 7933 - protein, 7 aa, synthetic construct
  REGION 1..7: note = n-mer motif
CASEVCQ

SEQ ID NO: 7934 - protein, 7 aa, synthetic construct
  REGION 1..7: note = n-mer motif
NLVMSGT

SEQ ID NO: 7935 - protein, 7 aa, synthetic construct
  REGION 1..7: note = n-mer motif
QSLKDGT

SEQ ID NO: 7936 - protein, 7 aa, synthetic construct
  REGION 1..7: note = n-mer motif
ALNGSGI

SEQ ID NO: 7937 - protein, 7 aa, synthetic construct
  REGION 1..7: note = n-mer motif
RHVVPDS

SEQ ID NO: 7938 - protein, 7 aa, synthetic construct
  REGION 1..7: note = n-mer motif
LYHDSHL

SEQ ID NO: 7939 - protein, 7 aa, synthetic construct
  REGION 1..7: note = n-mer motif
GSTPITS

SEQ ID NO: 7940 - protein, 7 aa, synthetic construct
  REGION 1..7: note = n-mer motif
PNDQISG

SEQ ID NO: 7941 - protein, 7 aa, synthetic construct
  REGION 1..7: note = n-mer motif
SGKQDKY

SEQ ID NO: 7942 - protein, 7 aa, synthetic construct
  REGION 1..7: note = n-mer motif
SGHASQG

SEQ ID NO: 7943 - protein, 7 aa, synthetic construct
  REGION 1..7: note = n-mer motif
KMGSIEV

SEQ ID NO: 7944 - protein, 7 aa, synthetic construct
  REGION 1..7: note = n-mer motif
STLDRSE

SEQ ID NO: 7945 - protein, 7 aa, synthetic construct
  REGION 1..7: note = n-mer motif
TELSEYT

SEQ ID NO: 7946 - protein, 7 aa, synthetic construct
  REGION 1..7: note = n-mer motif
ANGGGYP

SEQ ID NO: 7947 - protein, 7 aa, synthetic construct
  REGION 1..7: note = n-mer motif
VTESNSL

SEQ ID NO: 7948 - protein, 7 aa, synthetic construct
  REGION 1..7: note = n-mer motif
PVYDRDV

SEQ ID NO: 7949 - protein, 7 aa, synthetic construct
  REGION 1..7: note = n-mer motif
DNNKHGT

SEQ ID NO: 7950 - protein, 7 aa, synthetic construct
  REGION 1..7: note = n-mer motif
IYETVTL

SEQ ID NO: 7951 - protein, 7 aa, synthetic construct
  REGION 1..7: note = n-mer motif
TQTGHVS

SEQ ID NO: 7952 - protein, 7 aa, synthetic construct
  REGION 1..7: note = n-mer motif
QADLRYK

SEQ ID NO: 7953 - protein, 7 aa, synthetic construct
  REGION 1..7: note = n-mer motif
CKTNNAG

SEQ ID NO: 7954 - protein, 7 aa, synthetic construct
  REGION 1..7: note = n-mer motif
AGHQQLA

SEQ ID NO: 7955 - protein, 7 aa, synthetic construct
  REGION 1..7: note = n-mer motif
DRDMEGV

SEQ ID NO: 7956 - protein, 7 aa, synthetic construct
  REGION 1..7: note = n-mer motif
DQPGYVR

SEQ ID NO: 7957 - protein, 7 aa, synthetic construct
  REGION 1..7: note = n-mer motif
DAMLAHP

SEQ ID NO: 7958 - protein, 7 aa, synthetic construct
  REGION 1..7: note = n-mer motif
ALNLYSS

SEQ ID NO: 7959 - protein, 7 aa, synthetic construct
  REGION 1..7: note = n-mer motif
LLSKGDS

SEQ ID NO: 7960 - protein, 7 aa, synthetic construct
  REGION 1..7: note = n-mer motif
SSISLRY

SEQ ID NO: 7961 - protein, 7 aa, synthetic construct
  REGION 1..7: note = n-mer motif
GSSQHHE

SEQ ID NO: 7962 - protein, 7 aa, synthetic construct
  REGION 1..7: note = n-mer motif
SIGYSPP

SEQ ID NO: 7963 - protein, 7 aa, synthetic construct
  REGION 1..7: note = n-mer motif
HSNATTI

SEQ ID NO: 7964 - protein, 7 aa, synthetic construct
  REGION 1..7: note = n-mer motif
SAHDARL

SEQ ID NO: 7965 - protein, 7 aa, synthetic construct
  REGION 1..7: note = n-mer motif
VHTADTI

SEQ ID NO: 7966 - protein, 7 aa, synthetic construct
  REGION 1..7: note = n-mer motif
RDGSTKV

SEQ ID NO: 7967 - protein, 7 aa, synthetic construct
  REGION 1..7: note = n-mer motif
LQESLPG

SEQ ID NO: 7968 - protein, 7 aa, synthetic construct
  REGION 1..7: note = n-mer motif
LDYTPQN

SEQ ID NO: 7969 - protein, 7 aa, synthetic construct
  REGION 1..7: note = n-mer motif
GPSSHIV

SEQ ID NO: 7970 - protein, 7 aa, synthetic construct
  REGION 1..7: note = n-mer motif
SADTRSP

SEQ ID NO: 7971 - protein, 7 aa, synthetic construct
  REGION 1..7: note = n-mer motif
MMKSEEN

SEQ ID NO: 7972 - protein, 7 aa, synthetic construct
  REGION 1..7: note = n-mer motif
GMTSELT

SEQ ID NO: 7973 - protein, 7 aa, synthetic construct
  REGION 1..7: note = n-mer motif
VDTYSGL

SEQ ID NO: 7974 - protein, 7 aa, synthetic construct
  REGION 1..7: note = n-mer motif
GMRDTPP

SEQ ID NO: 7975 - protein, 7 aa, synthetic construct
  REGION 1..7: note = n-mer motif
EHDVSTR

SEQ ID NO: 7976 - protein, 7 aa, synthetic construct
  REGION 1..7: note = n-mer motif
EVVKTTH

SEQ ID NO: 7977 - protein, 7 aa, synthetic construct
  REGION 1..7: note = n-mer motif
VYDNVSS

SEQ ID NO: 7978 - protein, 7 aa, synthetic construct
  REGION 1..7: note = n-mer motif
LMKDMES

SEQ ID NO: 7979 - protein, 7 aa, synthetic construct
  REGION 1..7: note = n-mer motif
PLHVASP

SEQ ID NO: 7980 - protein, 7 aa, synthetic construct
  REGION 1..7: note = n-mer motif
EVRDQKT

SEQ ID NO: 7981 - protein, 7 aa, synthetic construct
  REGION 1..7: note = n-mer motif
PTPYYTA

SEQ ID NO: 7982 - protein, 7 aa, synthetic construct
  REGION 1..7: note = n-mer motif
NNYAYSA

SEQ ID NO: 7983 - protein, 7 aa, synthetic construct
  REGION 1..7: note = n-mer motif
LVDTDRN

SEQ ID NO: 7984 - protein, 7 aa, synthetic construct
  REGION 1..7: note = n-mer motif
YPADHRT

SEQ ID NO: 7985 - protein, 7 aa, synthetic construct
  REGION 1..7: note = n-mer motif
SATTNHG

SEQ ID NO: 7986 - protein, 7 aa, synthetic construct
  REGION 1..7: note = n-mer motif
RDDQQLD

SEQ ID NO: 7987 - protein, 7 aa, synthetic construct
  REGION 1..7: note = n-mer motif
GAGQSHV

SEQ ID NO: 7988 - protein, 7 aa, synthetic construct
  REGION 1..7: note = n-mer motif
DRTYHEV

SEQ ID NO: 7989 - protein, 7 aa, synthetic construct
  REGION 1..7: note = n-mer motif
DGNNTTY

SEQ ID NO: 7990 - protein, 7 aa, synthetic construct
  REGION 1..7: note = n-mer motif
VHMESYA

SEQ ID NO: 7991 - protein, 7 aa, synthetic construct
  REGION 1..7: note = n-mer motif
WYETISP

SEQ ID NO: 7992 - protein, 7 aa, synthetic construct
  REGION 1..7: note = n-mer motif
LLGAHQP

SEQ ID NO: 7993 - protein, 7 aa, synthetic construct
  REGION 1..7: note = n-mer motif
HVPNTEA

SEQ ID NO: 7994 - protein, 7 aa, synthetic construct
  REGION 1..7: note = n-mer motif
NSQNPQG

SEQ ID NO: 7995 - protein, 7 aa, synthetic construct
  REGION 1..7: note = n-mer motif
LQDRATN

SEQ ID NO: 7996 - protein, 7 aa, synthetic construct
  REGION 1..7: note = n-mer motif
IVNQHSE

SEQ ID NO: 7997 - protein, 7 aa, synthetic construct
  REGION 1..7: note = n-mer motif
FEQGKVE

SEQ ID NO: 7998 - protein, 7 aa, synthetic construct
  REGION 1..7: note = n-mer motif
VATGVFA

SEQ ID NO: 7999 - protein, 7 aa, synthetic construct
  REGION 1..7: note = n-mer motif
DKIQNET

SEQ ID NO: 8000 - protein, 7 aa, synthetic construct
  REGION 1..7: note = n-mer motif
TDNPSYK

SEQ ID NO: 8001 - protein, 7 aa, synthetic construct
  REGION 1..7: note = n-mer motif
GVNTKIE

SEQ ID NO: 8002 - protein, 7 aa, synthetic construct
  REGION 1..7: note = n-mer motif
GSHNGPA

SEQ ID NO: 8003 - protein, 7 aa, synthetic construct
  REGION 1..7: note = n-mer motif
SNMGVAS

SEQ ID NO: 8004 - protein, 7 aa, synthetic construct
  REGION 1..7: note = n-mer motif
NTDTNEK

SEQ ID NO: 8005 - protein, 7 aa, synthetic construct
  REGION 1..7: note = n-mer motif
SALLRMD

SEQ ID NO: 8006 - protein, 7 aa, synthetic construct
  REGION 1..7: note = n-mer motif
PQLSGTA

SEQ ID NO: 8007 - protein, 7 aa, synthetic construct
  REGION 1..7: note = n-mer motif
SIVNNGA

SEQ ID NO: 8008 - protein, 7 aa, synthetic construct
  REGION 1..7: note = n-mer motif
SLDHAPL

SEQ ID NO: 8009 - protein, 7 aa, synthetic construct
  REGION 1..7: note = n-mer motif
DHSKQNS

SEQ ID NO: 8010 - protein, 7 aa, synthetic construct
  REGION 1..7: note = n-mer motif
HSDMVSG

SEQ ID NO: 8011 - protein, 7 aa, synthetic construct
  REGION 1..7: note = n-mer motif
QHRAQDV

SEQ ID NO: 8012 - protein, 7 aa, synthetic construct
  REGION 1..7: note = n-mer motif
GSTKSGQ

SEQ ID NO: 8013 - protein, 7 aa, synthetic construct
  REGION 1..7: note = n-mer motif
TMSVTLE

SEQ ID NO: 8014 - protein, 7 aa, synthetic construct
  REGION 1..7: note = n-mer motif
YNNGGHV

SEQ ID NO: 8015 - protein, 7 aa, synthetic construct
  REGION 1..7: note = n-mer motif
GTAENTS

SEQ ID NO: 8016 - protein, 7 aa, synthetic construct
  REGION 1..7: note = n-mer motif
NSYDATR

SEQ ID NO: 8017 - protein, 7 aa, synthetic construct
  REGION 1..7: note = n-mer motif
SVNNMRL

SEQ ID NO: 8018 - protein, 7 aa, synthetic construct
  REGION 1..7: note = n-mer motif
LNLQYTL

SEQ ID NO: 8019 - protein, 7 aa, synthetic construct
  REGION 1..7: note = n-mer motif
EAQTGWV

SEQ ID NO: 8020 - protein, 7 aa, synthetic construct
  REGION 1..7: note = n-mer motif
PAEGNNR

SEQ ID NO: 8021 - protein, 7 aa, synthetic construct
  REGION 1..7: note = n-mer motif
SLGGNPP

SEQ ID NO: 8022 - protein, 7 aa, synthetic construct
  REGION 1..7: note = n-mer motif
YNRDNGS

SEQ ID NO: 8023 - protein, 7 aa, synthetic construct
  REGION 1..7: note = n-mer motif
LTDPKGQ

SEQ ID NO: 8024 - protein, 7 aa, synthetic construct
  REGION 1..7: note = n-mer motif
TPTGTNK

SEQ ID NO: 8025 - protein, 7 aa, synthetic construct
  REGION 1..7: note = n-mer motif
VHANATL

SEQ ID NO: 8026 - protein, 7 aa, synthetic construct
  REGION 1..7: note = n-mer motif
REIVHSN

SEQ ID NO: 8027 - protein, 7 aa, synthetic construct
  REGION 1..7: note = n-mer motif
YAVAIGT

SEQ ID NO: 8028 - protein, 7 aa, synthetic construct
  REGION 1..7: note = n-mer motif
NTTPPDH

SEQ ID NO: 8029 - protein, 7 aa, synthetic construct
  REGION 1..7: note = n-mer motif
VIQSDNT

SEQ ID NO: 8030 - protein, 7 aa, synthetic construct
  REGION 1..7: note = n-mer motif
VPAHSRG

SEQ ID NO: 8031 - protein, 7 aa, synthetic construct
  REGION 1..7: note = n-mer motif
QNSDLAS

SEQ ID NO: 8032 - protein, 7 aa, synthetic construct
  REGION 1..7: note = n-mer motif
RIVDTLG

SEQ ID NO: 8033 - protein, 7 aa, synthetic construct
  REGION 1..7: note = n-mer motif
HTYSQAD

SEQ ID NO: 8034 - protein, 7 aa, synthetic construct
  REGION 1..7: note = n-mer motif
TAPSVGS

SEQ ID NO: 8035 - protein, 7 aa, synthetic construct
  REGION 1..7: note = n-mer motif
NVGTDRD

SEQ ID NO: 8036 - protein, 7 aa, synthetic construct
  REGION 1..7: note = n-mer motif
GINRTSE

SEQ ID NO: 8037 - protein, 7 aa, synthetic construct
  REGION 1..7: note = n-mer motif
VETDSLI

SEQ ID NO: 8038 - protein, 7 aa, synthetic construct
  REGION 1..7: note = n-mer motif
HSAAGDG

SEQ ID NO: 8039 - protein, 7 aa, synthetic construct
  REGION 1..7: note = n-mer motif
DAGISSY

SEQ ID NO: 8040 - protein, 7 aa, synthetic construct
  REGION 1..7: note = n-mer motif
CTATKCS

SEQ ID NO: 8041 - protein, 7 aa, synthetic construct
  REGION 1..7: note = n-mer motif
RIDTLLV

SEQ ID NO: 8042 - protein, 7 aa, synthetic construct
  REGION 1..7: note = n-mer motif
VSQSHDV

SEQ ID NO: 8043 - protein, 7 aa, synthetic construct
  REGION 1..7: note = n-mer motif
ALPSHSS

SEQ ID NO: 8044 - protein, 7 aa, synthetic construct
  REGION 1..7: note = n-mer motif
GKPAEAP

SEQ ID NO: 8045 - protein, 7 aa, synthetic construct
  REGION 1..7: note = n-mer motif
WNSPGEA

SEQ ID NO: 8046 - protein, 7 aa, synthetic construct
  REGION 1..7: note = n-mer motif
RLERPDY

SEQ ID NO: 8047 - protein, 7 aa, synthetic construct
  REGION 1..7: note = n-mer motif
TRESLVD

SEQ ID NO: 8048 - protein, 7 aa, synthetic construct
  REGION 1..7: note = n-mer motif
RHEGPYS

SEQ ID NO: 8049 - protein, 7 aa, synthetic construct
  REGION 1..7: note = n-mer motif
VLSDKAF

SEQ ID NO: 8050 - protein, 7 aa, synthetic construct
  REGION 1..7: note = n-mer motif
TSATDSM

SEQ ID NO: 8051 - protein, 7 aa, synthetic construct
  REGION 1..7: note = n-mer motif
TEPLPMS

SEQ ID NO: 8052 - protein, 7 aa, synthetic construct
  REGION 1..7: note = n-mer motif
MPYVGTV

SEQ ID NO: 8053 - protein, 7 aa, synthetic construct
  REGION 1..7: note = n-mer motif
RDYSPTD

SEQ ID NO: 8054 - protein, 7 aa, synthetic construct
  REGION 1..7: note = n-mer motif
RNGGTTD

SEQ ID NO: 8055 - protein, 7 aa, synthetic construct
  REGION 1..7: note = n-mer motif
MMGATTK

SEQ ID NO: 8056 - protein, 7 aa, synthetic construct
  REGION 1..7: note = n-mer motif
AAVGGDT

SEQ ID NO: 8057 - protein, 7 aa, synthetic construct
  REGION 1..7: note = n-mer motif
LVNNDGT

SEQ ID NO: 8058 - protein, 7 aa, synthetic construct
  REGION 1..7: note = n-mer motif
SSTPQDT

SEQ ID NO: 8059 - protein, 7 aa, synthetic construct
  REGION 1..7: note = n-mer motif
SLRMENS

SEQ ID NO: 8060 - protein, 7 aa, synthetic construct
  REGION 1..7: note = n-mer motif
VQGQTGW

SEQ ID NO: 8061 - protein, 7 aa, synthetic construct
  REGION 1..7: note = n-mer motif
LGFTPQP

SEQ ID NO: 8062 - protein, 7 aa, synthetic construct
  REGION 1..7: note = n-mer motif
SVAKDQT

SEQ ID NO: 8063 - protein, 7 aa, synthetic construct
  REGION 1..7: note = n-mer motif
PRHELSN

SEQ ID NO: 8064 - protein, 7 aa, synthetic construct
  REGION 1..7: note = n-mer motif
KMGSNPA

SEQ ID NO: 8065 - protein, 7 aa, synthetic construct
  REGION 1..7: note = n-mer motif
EATHGSY

SEQ ID NO: 8066 - protein, 7 aa, synthetic construct
  REGION 1..7: note = n-mer motif
PEVACPG

SEQ ID NO: 8067 - protein, 7 aa, synthetic construct
  REGION 1..7: note = n-mer motif
VNTREVT

SEQ ID NO: 8068 - protein, 7 aa, synthetic construct
  REGION 1..7: note = n-mer motif
TARAIDM

SEQ ID NO: 8069 - protein, 7 aa, synthetic construct
  REGION 1..7: note = n-mer motif
TDGALGY

SEQ ID NO: 8070 - protein, 7 aa, synthetic construct
  REGION 1..7: note = n-mer motif
GSQYANR

SEQ ID NO: 8071 - protein, 7 aa, synthetic construct
  REGION 1..7: note = n-mer motif
EMGNQYP

SEQ ID NO: 8072 - protein, 7 aa, synthetic construct
  REGION 1..7: note = n-mer motif
PSTLAET

SEQ ID NO: 8073 - protein, 7 aa, synthetic construct
  REGION 1..7: note = n-mer motif
RIGVGAP

SEQ ID NO: 8074 - protein, 7 aa, synthetic construct
  REGION 1..7: note = n-mer motif
LSVKEEI

SEQ ID NO: 8075 - protein, 7 aa, synthetic construct
  REGION 1..7: note = n-mer motif
YTTHESG

SEQ ID NO: 8076 - protein, 7 aa, synthetic construct
  REGION 1..7: note = n-mer motif
LTAVLTV

SEQ ID NO: 8077 - protein, 7 aa, synthetic construct
  REGION 1..7: note = n-mer motif
LQTSVAT

SEQ ID NO: 8078 - protein, 7 aa, synthetic construct
  REGION 1..7: note = n-mer motif
TVRSPQP

SEQ ID NO: 8079 - protein, 7 aa, synthetic construct
  REGION 1..7: note = n-mer motif
HPDGTRP

SEQ ID NO: 8080 - protein, 7 aa, synthetic construct
  REGION 1..7: note = n-mer motif
GVTIGSR

SEQ ID NO: 8081 - protein, 7 aa, synthetic construct
  REGION 1..7: note = n-mer motif
TYASTEA

SEQ ID NO: 8082 - protein, 7 aa, synthetic construct
  REGION 1..7: note = n-mer motif
RSSPATN

SEQ ID NO: 8083 - protein, 7 aa, synthetic construct
  REGION 1..7: note = n-mer motif
IGSPLAN

SEQ ID NO: 8084 - protein, 7 aa, synthetic construct
  REGION 1..7: note = n-mer motif
ASTESHV

SEQ ID NO: 8085 - protein, 7 aa, synthetic construct
  REGION 1..7: note = n-mer motif
IAQNETY

SEQ ID NO: 8086 - protein, 7 aa, synthetic construct
  REGION 1..7: note = n-mer motif
MESKPWQ

SEQ ID NO: 8087 - protein, 7 aa, synthetic construct
  REGION 1..7: note = n-mer motif
LENPTPA

SEQ ID NO: 8088 - protein, 7 aa, synthetic construct
  REGION 1..7: note = n-mer motif
PNPSPRQ

SEQ ID NO: 8089 - protein, 7 aa, synthetic construct
  REGION 1..7: note = n-mer motif
STSNPPY

SEQ ID NO: 8090 - protein, 7 aa, synthetic construct
  REGION 1..7: note = n-mer motif
YLTDTPT

SEQ ID NO: 8091 - protein, 7 aa, synthetic construct
  REGION 1..7: note = n-mer motif
IRALMTD

SEQ ID NO: 8092 - protein, 7 aa, synthetic construct
  REGION 1..7: note = n-mer motif
PMGTDTV

SEQ ID NO: 8093 - protein, 7 aa, synthetic construct
  REGION 1..7: note = n-mer motif
TRTQGTS

SEQ ID NO: 8094 - protein, 7 aa, synthetic construct
  REGION 1..7: note = n-mer motif
SNNMNQA

SEQ ID NO: 8095 - protein, 7 aa, synthetic construct
  REGION 1..7: note = n-mer motif
EDSVNHI

SEQ ID NO: 8096 - protein, 7 aa, synthetic construct
  REGION 1..7: note = n-mer motif
SVVPTDK

SEQ ID NO: 8097 - protein, 7 aa, synthetic construct
  REGION 1..7: note = n-mer motif
VRGVQDA

SEQ ID NO: 8098 - protein, 7 aa, synthetic construct
  REGION 1..7: note = n-mer motif
HDVTVRN

SEQ ID NO: 8099 - protein, 7 aa, synthetic construct
  REGION 1..7: note = n-mer motif
HNNHAGE

SEQ ID NO: 8100 - protein, 7 aa, synthetic construct
  REGION 1..7: note = n-mer motif
GNMNHSI

SEQ ID NO: 8101 - protein, 7 aa, synthetic construct
  REGION 1..7: note = n-mer motif
GVHTHTV

SEQ ID NO: 8102 - protein, 7 aa, synthetic construct
  REGION 1..7: note = n-mer motif
FLPQLGQ

SEQ ID NO: 8103 - protein, 7 aa, synthetic construct
  REGION 1..7: note = n-mer motif
LANMSAP

SEQ ID NO: 8104 - protein, 7 aa, synthetic construct
  REGION 1..7: note = n-mer motif
VRRDETP

SEQ ID NO: 8105 - protein, 7 aa, synthetic construct
  REGION 1..7: note = n-mer motif
CRDNVLA

SEQ ID NO: 8106 - protein, 7 aa, synthetic construct
  REGION 1..7: note = n-mer motif
MLASRVP

SEQ ID NO: 8107 - protein, 7 aa, synthetic construct
  REGION 1..7: note = n-mer motif
VRTVLQQ

SEQ ID NO: 8108 - protein, 7 aa, synthetic construct
  REGION 1..7: note = n-mer motif
SNQNVDW

SEQ ID NO: 8109 - protein, 7 aa, synthetic construct
  REGION 1..7: note = n-mer motif
TEVTGDS

SEQ ID NO: 8110 - protein, 7 aa, synthetic construct
  REGION 1..7: note = n-mer motif
ESATSLK

SEQ ID NO: 8111 - protein, 7 aa, synthetic construct
  REGION 1..7: note = n-mer motif
NHPAPSS

SEQ ID NO: 8112 - protein, 7 aa, synthetic construct
  REGION 1..7: note = n-mer motif
YGNANTV

SEQ ID NO: 8113 - protein, 7 aa, synthetic construct
  REGION 1..7: note = n-mer motif
QNDKSDN

SEQ ID NO: 8114 - protein, 7 aa, synthetic construct
  REGION 1..7: note = n-mer motif
SQAQIRV

SEQ ID NO: 8115 - protein, 7 aa, synthetic construct
  REGION 1..7: note = n-mer motif
FQRDVGH

SEQ ID NO: 8116 - protein, 7 aa, synthetic construct
  REGION 1..7: note = n-mer motif
LMNRNAP

SEQ ID NO: 8117 - protein, 7 aa, synthetic construct
  REGION 1..7: note = n-mer motif
AGSSPSR

SEQ ID NO: 8118 - protein, 7 aa, synthetic construct
  REGION 1..7: note = n-mer motif
LFHSQMT

SEQ ID NO: 8119 - protein, 7 aa, synthetic construct
  REGION 1..7: note = n-mer motif
MMSNSLA

SEQ ID NO: 8120 - protein, 7 aa, synthetic construct
  REGION 1..7: note = n-mer motif
VTTVLQS

SEQ ID NO: 8121 - protein, 7 aa, synthetic construct
  REGION 1..7: note = n-mer motif
GSQRAMN

SEQ ID NO: 8122 - protein, 7 aa, synthetic construct
  REGION 1..7: note = n-mer motif
ASGARYV

SEQ ID NO: 8123 - protein, 7 aa, synthetic construct
  REGION 1..7: note = n-mer motif
KNYDSDS

SEQ ID NO: 8124 - protein, 7 aa, synthetic construct
  REGION 1..7: note = n-mer motif
VGSGVGV

SEQ ID NO: 8125 - protein, 7 aa, synthetic construct
  REGION 1..7: note = n-mer motif
RSDLTES

SEQ ID NO: 8126 - protein, 7 aa, synthetic construct
  REGION 1..7: note = n-mer motif
RAEFIDT

SEQ ID NO: 8127 - protein, 7 aa, synthetic construct
  REGION 1..7: note = n-mer motif
TSEMRTA

SEQ ID NO: 8128 - protein, 7 aa, synthetic construct
  REGION 1..7: note = n-mer motif
ELDHLSH

SEQ ID NO: 8129 - protein, 7 aa, synthetic construct
  REGION 1..7: note = n-mer motif
TQAGLAS

SEQ ID NO: 8130 - protein, 7 aa, synthetic construct
  REGION 1..7: note = n-mer motif
AAQHHDT

SEQ ID NO: 8131 - protein, 7 aa, synthetic construct
  REGION 1..7: note = n-mer motif
GGAHTRV

SEQ ID NO: 8132 - protein, 7 aa, synthetic construct
  REGION 1..7: note = n-mer motif
AYGIHEV

SEQ ID NO: 8133 - protein, 7 aa, synthetic construct
  REGION 1..7: note = n-mer motif
AMLRMEQ

SEQ ID NO: 8134 - protein, 7 aa, synthetic construct
  REGION 1..7: note = n-mer motif
TDRSRLG

SEQ ID NO: 8135 - protein, 7 aa, synthetic construct
  REGION 1..7: note = n-mer motif
EREPPKN

SEQ ID NO: 8136 - protein, 7 aa, synthetic construct
  REGION 1..7: note = n-mer motif
VVKEIKL

SEQ ID NO: 8137 - protein, 7 aa, synthetic construct
  REGION 1..7: note = n-mer motif
HTGQTPS

SEQ ID NO: 8138 - protein, 7 aa, synthetic construct
  REGION 1..7: note = n-mer motif
VSLSSPP

SEQ ID NO: 8139 - protein, 7 aa, synthetic construct
  REGION 1..7: note = n-mer motif
GAGNLGT

SEQ ID NO: 8140 - protein, 7 aa, synthetic construct
  REGION 1..7: note = n-mer motif
ARDDTIQ

SEQ ID NO: 8141 - protein, 7 aa, synthetic construct
  REGION 1..7: note = n-mer motif
GTYTNMP

SEQ ID NO: 8142 - protein, 7 aa, synthetic construct
  REGION 1..7: note = n-mer motif
MLGGFAQ

SEQ ID NO: 8143 - protein, 7 aa, synthetic construct
  REGION 1..7: note = n-mer motif
PSEMRAV

SEQ ID NO: 8144 - protein, 7 aa, synthetic construct
  REGION 1..7: note = n-mer motif
RISPENS

SEQ ID NO: 8145 - protein, 7 aa, synthetic construct
  REGION 1..7: note = n-mer motif
KMGGSQS

SEQ ID NO: 8146 - protein, 7 aa, synthetic construct
  REGION 1..7: note = n-mer motif
GLMAHVT

SEQ ID NO: 8147 - protein, 7 aa, synthetic construct
  REGION 1..7: note = n-mer motif
SRQTALT

SEQ ID NO: 8148 - protein, 7 aa, synthetic construct
  REGION 1..7: note = n-mer motif
SDLNLPP

SEQ ID NO: 8149 - protein, 7 aa, synthetic construct
  REGION 1..7: note = n-mer motif
YVSDYLH

SEQ ID NO: 8150 - protein, 7 aa, synthetic construct
  REGION 1..7: note = n-mer motif
TNDNSDR

SEQ ID NO: 8151 - protein, 7 aa, synthetic construct
  REGION 1..7: note = n-mer motif
YLMHDSA

SEQ ID NO: 8152 - protein, 7 aa, synthetic construct
  REGION 1..7: note = n-mer motif
GSRNGPT

SEQ ID NO: 8153 - protein, 7 aa, synthetic construct
  REGION 1..7: note = n-mer motif
KNGVIND

SEQ ID NO: 8154 - protein, 7 aa, synthetic construct
  REGION 1..7: note = n-mer motif
ESVANLK

SEQ ID NO: 8155 - protein, 7 aa, synthetic construct
  REGION 1..7: note = n-mer motif
ASDSTTP

SEQ ID NO: 8156 - protein, 7 aa, synthetic construct
  REGION 1..7: note = n-mer motif
LNVSSSK

SEQ ID NO: 8157 - protein, 7 aa, synthetic construct
  REGION 1..7: note = n-mer motif
EAKGFGH

SEQ ID NO: 8158 - protein, 7 aa, synthetic construct
  REGION 1..7: note = n-mer motif
GTSAESR

SEQ ID NO: 8159 - protein, 7 aa, synthetic construct
  REGION 1..7: note = n-mer motif
MHNLPSY

SEQ ID NO: 8160 - protein, 7 aa, synthetic construct
  REGION 1..7: note = n-mer motif
VFTEIES

SEQ ID NO: 8161 - protein, 7 aa, synthetic construct
  REGION 1..7: note = n-mer motif
TQTSTWT

SEQ ID NO: 8162 - protein, 7 aa, synthetic construct
  REGION 1..7: note = n-mer motif
PMNKDIL

SEQ ID NO: 8163 - protein, 7 aa, synthetic construct
  REGION 1..7: note = n-mer motif
KESEYRV

SEQ ID NO: 8164 - protein, 7 aa, synthetic construct
  REGION 1..7: note = n-mer motif
STNSEAV

SEQ ID NO: 8165 - protein, 7 aa, synthetic construct
  REGION 1..7: note = n-mer motif
DTANRST

SEQ ID NO: 8166 - protein, 7 aa, synthetic construct
  REGION 1..7: note = n-mer motif
PKAPLNN

SEQ ID NO: 8167 - protein, 7 aa, synthetic construct
  REGION 1..7: note = n-mer motif
LATYPSH

SEQ ID NO: 8168 - protein, 7 aa, synthetic construct
  REGION 1..7: note = n-mer motif
ATVQSVD

SEQ ID NO: 8169 - protein, 7 aa, synthetic construct
  REGION 1..7: note = n-mer motif
NSMGNGG

SEQ ID NO: 8170 - protein, 7 aa, synthetic construct
  REGION 1..7: note = n-mer motif
DHSEQNS

SEQ ID NO: 8171 - protein, 7 aa, synthetic construct
  REGION 1..7: note = n-mer motif
TFLPQLG

SEQ ID NO: 8172 - protein, 7 aa, synthetic construct
  REGION 1..7: note = n-mer motif
GFTNTSK

SEQ ID NO: 8173 - protein, 7 aa, synthetic construct
  REGION 1..7: note = n-mer motif
TMNYSHT

SEQ ID NO: 8174 - protein, 7 aa, synthetic construct
  REGION 1..7: note = n-mer motif
SIGFSVG

SEQ ID NO: 8175 - protein, 7 aa, synthetic construct
  REGION 1..7: note = n-mer motif
SENRAGN

SEQ ID NO: 8176 - protein, 7 aa, synthetic construct
  REGION 1..7: note = n-mer motif
SLNLHSV

SEQ ID NO: 8177 - protein, 7 aa, synthetic construct
  REGION 1..7: note = n-mer motif
HESHYVS

SEQ ID NO: 8178 - protein, 7 aa, synthetic construct
  REGION 1..7: note = n-mer motif
NVVNGMD

SEQ ID NO: 8179 - protein, 7 aa, synthetic construct
  REGION 1..7: note = n-mer motif
HSDKVSS

SEQ ID NO: 8180 - protein, 7 aa, synthetic construct
  REGION 1..7: note = n-mer motif
KSVGDGR

SEQ ID NO: 8181 - protein, 7 aa, synthetic construct
  REGION 1..7: note = n-mer motif
RQVEQSD

SEQ ID NO: 8182 - protein, 7 aa, synthetic construct
  REGION 1..7: note = n-mer motif
RELVNTD

SEQ ID NO: 8183 - protein, 7 aa, synthetic construct
  REGION 1..7: note = n-mer motif
NYRDITM

SEQ ID NO: 8184 - protein, 7 aa, synthetic construct
  REGION 1..7: note = n-mer motif
ASLDRLP

SEQ ID NO: 8185 - protein, 7 aa, synthetic construct
  REGION 1..7: note = n-mer motif
RQLASLP

SEQ ID NO: 8186 - protein, 7 aa, synthetic construct
  REGION 1..7: note = n-mer motif
VSKTKDS

SEQ ID NO: 8187 - protein, 7 aa, synthetic construct
  REGION 1..7: note = n-mer motif
NVYEGHR

SEQ ID NO: 8188 - protein, 7 aa, synthetic construct
  REGION 1..7: note = n-mer motif
LEQLRVP

SEQ ID NO: 8189 - protein, 7 aa, synthetic construct
  REGION 1..7: note = n-mer motif
MTYTSPT

SEQ ID NO: 8190 - protein, 7 aa, synthetic construct
  REGION 1..7: note = n-mer motif
NSHTDRG

SEQ ID NO: 8191 - protein, 7 aa, synthetic construct
  REGION 1..7: note = n-mer motif
VAGGTSE

SEQ ID NO: 8192 - protein, 7 aa, synthetic construct
  REGION 1..7: note = n-mer motif
VDAHRAN

SEQ ID NO: 8193 - protein, 7 aa, synthetic construct
  REGION 1..7: note = n-mer motif
RADMTPL

SEQ ID NO: 8194 - protein, 7 aa, synthetic construct
  REGION 1..7: note = n-mer motif
GHEQTDA

SEQ ID NO: 8195 - protein, 7 aa, synthetic construct
  REGION 1..7: note = n-mer motif
YIAGGDQ

SEQ ID NO: 8196 - protein, 7 aa, synthetic construct
  REGION 1..7: note = n-mer motif
YGDLTTV

SEQ ID NO: 8197 - protein, 7 aa, synthetic construct
  REGION 1..7: note = n-mer motif
RLDLQEH

SEQ ID NO: 8198 - protein, 7 aa, synthetic construct
  REGION 1..7: note = n-mer motif
HLNPAAQ

SEQ ID NO: 8199 - protein, 7 aa, synthetic construct
  REGION 1..7: note = n-mer motif
GVNEQTN

SEQ ID NO: 8200 - protein, 7 aa, synthetic construct
  REGION 1..7: note = n-mer motif
RRLSTDL

SEQ ID NO: 8201 - protein, 7 aa, synthetic construct
  REGION 1..7: note = n-mer motif
GSTGLPP

SEQ ID NO: 8202 - protein, 7 aa, synthetic construct
  REGION 1..7: note = n-mer motif
DDMVKNS

SEQ ID NO: 8203 - protein, 7 aa, synthetic construct
  REGION 1..7: note = n-mer motif
VIDLVTR

SEQ ID NO: 8204 - protein, 7 aa, synthetic construct
  REGION 1..7: note = n-mer motif
GGLTNGL

SEQ ID NO: 8205 - protein, 7 aa, synthetic construct
  REGION 1..7: note = n-mer motif
RMEETAY

SEQ ID NO: 8206 - protein, 7 aa, synthetic construct
  REGION 1..7: note = n-mer motif
TDISGYG

SEQ ID NO: 8207 - protein, 7 aa, synthetic construct
  REGION 1..7: note = n-mer motif
QVNHNTS

SEQ ID NO: 8208 - protein, 7 aa, synthetic construct
  REGION 1..7: note = n-mer motif
ATTEDVR

SEQ ID NO: 8209 - protein, 7 aa, synthetic construct
  REGION 1..7: note = n-mer motif
WSIKNQT

SEQ ID NO: 8210 - protein, 7 aa, synthetic construct
  REGION 1..7: note = n-mer motif
SPTSNTI

SEQ ID NO: 8211 - protein, 7 aa, synthetic construct
  REGION 1..7: note = n-mer motif
MKNSGFD

SEQ ID NO: 8212 - protein, 7 aa, synthetic construct
  REGION 1..7: note = n-mer motif
LVAERLP

SEQ ID NO: 8213 - protein, 7 aa, synthetic construct
  REGION 1..7: note = n-mer motif
GETNFPT

SEQ ID NO: 8214 - protein, 7 aa, synthetic construct
  REGION 1..7: note = n-mer motif
NGKLGTT

SEQ ID NO: 8215 - protein, 7 aa, synthetic construct
  REGION 1..7: note = n-mer motif
NLVAYTK

SEQ ID NO: 8216 - protein, 7 aa, synthetic construct
  REGION 1..7: note = n-mer motif
WQLTTSH

SEQ ID NO: 8217 - protein, 7 aa, synthetic construct
  REGION 1..7: note = n-mer motif
SLDLGGN

SEQ ID NO: 8218 - protein, 7 aa, synthetic construct
  REGION 1..7: note = n-mer motif
NESTKES

SEQ ID NO: 8219 - protein, 7 aa, synthetic construct
  REGION 1..7: note = n-mer motif
GFDGKQL

SEQ ID NO: 8220 - protein, 7 aa, synthetic construct
  REGION 1..7: note = n-mer motif
HLYISAD

SEQ ID NO: 8221 - protein, 7 aa, synthetic construct
  REGION 1..7: note = n-mer motif
LLPNNTH

SEQ ID NO: 8222 - protein, 7 aa, synthetic construct
  REGION 1..7: note = n-mer motif
SGMAGLS

SEQ ID NO: 8223 - protein, 7 aa, synthetic construct
  REGION 1..7: note = n-mer motif
ITSLPET

SEQ ID NO: 8224 - protein, 7 aa, synthetic construct
  REGION 1..7: note = n-mer motif
ELKESQK

SEQ ID NO: 8225 - protein, 7 aa, synthetic construct
  REGION 1..7: note = n-mer motif
NIVQDYP

SEQ ID NO: 8226 - protein, 7 aa, synthetic construct
  REGION 1..7: note = n-mer motif
SENTSVP

SEQ ID NO: 8227 - protein, 7 aa, synthetic construct
  REGION 1..7: note = n-mer motif
DPNQPKT

SEQ ID NO: 8228 - protein, 7 aa, synthetic construct
  REGION 1..7: note = n-mer motif
AGLDVNT

SEQ ID NO: 8229 - protein, 7 aa, synthetic construct
  REGION 1..7: note = n-mer motif
SHEMNNG

SEQ ID NO: 8230 - protein, 7 aa, synthetic construct
  REGION 1..7: note = n-mer motif
SYAINQS

SEQ ID NO: 8231 - protein, 7 aa, synthetic construct
  REGION 1..7: note = n-mer motif
GHLPAAK

SEQ ID NO: 8232 - protein, 7 aa, synthetic construct
  REGION 1..7: note = n-mer motif
ELGNKTA

SEQ ID NO: 8233 - protein, 7 aa, synthetic construct
  REGION 1..7: note = n-mer motif
LESTRKA

SEQ ID NO: 8234 - protein, 7 aa, synthetic construct
  REGION 1..7: note = n-mer motif
TQGNSEA

SEQ ID NO: 8235 - protein, 7 aa, synthetic construct
  REGION 1..7: note = n-mer motif
ISIDSAM

SEQ ID NO: 8236 - protein, 7 aa, synthetic construct
  REGION 1..7: note = n-mer motif
EFQRIRE

SEQ ID NO: 8237 - protein, 7 aa, synthetic construct
  REGION 1..7: note = n-mer motif
ASLSAPA

SEQ ID NO: 8238 - protein, 7 aa, synthetic construct
  REGION 1..7: note = n-mer motif
DSQITRL

SEQ ID NO: 8239 - protein, 7 aa, synthetic construct
  REGION 1..7: note = n-mer motif
GHENMGV

SEQ ID NO: 8240 - protein, 7 aa, synthetic construct
  REGION 1..7: note = n-mer motif
MSAGHPT

SEQ ID NO: 8241 - protein, 7 aa, synthetic construct
  REGION 1..7: note = n-mer motif
HAPSGAI

SEQ ID NO: 8242 - protein, 7 aa, synthetic construct
  REGION 1..7: note = n-mer motif
TTITNSV

SEQ ID NO: 8243 - protein, 7 aa, synthetic construct
  REGION 1..7: note = n-mer motif
PQHQHEH

SEQ ID NO: 8244 - protein, 7 aa, synthetic construct
  REGION 1..7: note = n-mer motif
QYSMDTR

SEQ ID NO: 8245 - protein, 7 aa, synthetic construct
  REGION 1..7: note = n-mer motif
LYEVGTP

SEQ ID NO: 8246 - protein, 7 aa, synthetic construct
  REGION 1..7: note = n-mer motif
GETMRHN

SEQ ID NO: 8247 - protein, 7 aa, synthetic construct
  REGION 1..7: note = n-mer motif
MTITVEP

SEQ ID NO: 8248 - protein, 7 aa, synthetic construct
  REGION 1..7: note = n-mer motif
AQHPERS

SEQ ID NO: 8249 - protein, 7 aa, synthetic construct
  REGION 1..7: note = n-mer motif
THVAKPD

SEQ ID NO: 8250 - protein, 7 aa, synthetic construct
  REGION 1..7: note = n-mer motif
MTANLVE

SEQ ID NO: 8251 - protein, 7 aa, synthetic construct
  REGION 1..7: note = n-mer motif
NRQRDFE

SEQ ID NO: 8252 - protein, 7 aa, synthetic construct
  REGION 1..7: note = n-mer motif
SNSADAG

SEQ ID NO: 8253 - protein, 7 aa, synthetic construct
  REGION 1..7: note = n-mer motif
GEYGASV

SEQ ID NO: 8254 - protein, 7 aa, synthetic construct
  REGION 1..7: note = n-mer motif
DGMVRST

SEQ ID NO: 8255 - protein, 7 aa, synthetic construct
  REGION 1..7: note = n-mer motif
NGQLLAN

SEQ ID NO: 8256 - protein, 7 aa, synthetic construct
  REGION 1..7: note = n-mer motif
SAGMTLD

SEQ ID NO: 8257 - protein, 7 aa, synthetic construct
  REGION 1..7: note = n-mer motif
DHVHLTY

SEQ ID NO: 8258 - protein, 7 aa, synthetic construct
  REGION 1..7: note = n-mer motif
TTLTQTD

SEQ ID NO: 8259 - protein, 7 aa, synthetic construct
  REGION 1..7: note = n-mer motif
VQLADGH

SEQ ID NO: 8260 - protein, 7 aa, synthetic construct
  REGION 1..7: note = n-mer motif
TDSSADS

SEQ ID NO: 8261 - protein, 7 aa, synthetic construct
  REGION 1..7: note = n-mer motif
AMNVRSD

SEQ ID NO: 8262 - protein, 7 aa, synthetic construct
  REGION 1..7: note = n-mer motif
GDISYRV

SEQ ID NO: 8263 - protein, 7 aa, synthetic construct
  REGION 1..7: note = n-mer motif
MGYVDSL

SEQ ID NO: 8264 - protein, 7 aa, synthetic construct
  REGION 1..7: note = n-mer motif
LYLAAAS

SEQ ID NO: 8265 - protein, 7 aa, synthetic construct
  REGION 1..7: note = n-mer motif
SSPDSYR

SEQ ID NO: 8266 - protein, 7 aa, synthetic construct
  REGION 1..7: note = n-mer motif
SYNVDLH

SEQ ID NO: 8267 - protein, 7 aa, synthetic construct
  REGION 1..7: note = n-mer motif
QHTAHPM

SEQ ID NO: 8268 - protein, 7 aa, synthetic construct
  REGION 1..7: note = n-mer motif
AVMATHP

SEQ ID NO: 8269 - protein, 7 aa, synthetic construct
  REGION 1..7: note = n-mer motif
ISPSASN

SEQ ID NO: 8270 - protein, 7 aa, synthetic construct
  REGION 1..7: note = n-mer motif
TLDNNHS

SEQ ID NO: 8271 - protein, 7 aa, synthetic construct
  REGION 1..7: note = n-mer motif
SGSYVAT

SEQ ID NO: 8272 - protein, 7 aa, synthetic construct
  REGION 1..7: note = n-mer motif
MAAPPEH

SEQ ID NO: 8273 - protein, 7 aa, synthetic construct
  REGION 1..7: note = n-mer motif
QTASGDT

SEQ ID NO: 8274 - protein, 7 aa, synthetic construct
  REGION 1..7: note = n-mer motif
ESKTVVI

SEQ ID NO: 8275 - protein, 7 aa, synthetic construct
  REGION 1..7: note = n-mer motif
TVLPQSD

SEQ ID NO: 8276 - protein, 7 aa, synthetic construct
  REGION 1..7: note = n-mer motif
PLNANGS

SEQ ID NO: 8277 - protein, 7 aa, synthetic construct
  REGION 1..7: note = n-mer motif
PLNTGLT

SEQ ID NO: 8278 - protein, 7 aa, synthetic construct
  REGION 1..7: note = n-mer motif
AITIIGT

SEQ ID NO: 8279 - protein, 7 aa, synthetic construct
  REGION 1..7: note = n-mer motif
NPSAISY

SEQ ID NO: 8280 - protein, 7 aa, synthetic construct
  REGION 1..7: note = n-mer motif
TEHEKST

SEQ ID NO: 8281 - protein, 7 aa, synthetic construct
  REGION 1..7: note = n-mer motif
AESQLAS

SEQ ID NO: 8282 - protein, 7 aa, synthetic construct
  REGION 1..7: note = n-mer motif
VLKGTFP

SEQ ID NO: 8283 - protein, 7 aa, synthetic construct
  REGION 1..7: note = n-mer motif
SFAEITT

SEQ ID NO: 8284 - protein, 7 aa, synthetic construct
  REGION 1..7: note = n-mer motif
PLNGRVT

SEQ ID NO: 8285 - protein, 7 aa, synthetic construct
  REGION 1..7: note = n-mer motif
SERPQSS

SEQ ID NO: 8286 - protein, 7 aa, synthetic construct
  REGION 1..7: note = n-mer motif
AQLQDSV

SEQ ID NO: 8287 - protein, 7 aa, synthetic construct
  REGION 1..7: note = n-mer motif
PNRVTAP

SEQ ID NO: 8288 - protein, 7 aa, synthetic construct
  REGION 1..7: note = n-mer motif
ALIVSSM

SEQ ID NO: 8289 - protein, 7 aa, synthetic construct
  REGION 1..7: note = n-mer motif
AHGAFPV

SEQ ID NO: 8290 - protein, 7 aa, synthetic construct
  REGION 1..7: note = n-mer motif
EAYQTEK

SEQ ID NO: 8291 - protein, 7 aa, synthetic construct
  REGION 1..7: note = n-mer motif
AAASPLA

SEQ ID NO: 8292 - protein, 7 aa, synthetic construct
  REGION 1..7: note = n-mer motif
PQATLNN

SEQ ID NO: 8293 - protein, 7 aa, synthetic construct
  REGION 1..7: note = n-mer motif
TRGDMEF

SEQ ID NO: 8294 - protein, 7 aa, synthetic construct
  REGION 1..7: note = n-mer motif
SNLGEAS

SEQ ID NO: 8295 - protein, 7 aa, synthetic construct
  REGION 1..7: note = n-mer motif
GITGSPG

SEQ ID NO: 8296 - protein, 7 aa, synthetic construct
  REGION 1..7: note = n-mer motif
GFETSSP

SEQ ID NO: 8297 - protein, 7 aa, synthetic construct
  REGION 1..7: note = n-mer motif
PARSDAL

SEQ ID NO: 8298 - protein, 7 aa, synthetic construct
  REGION 1..7: note = n-mer motif
HANYVEV

SEQ ID NO: 8299 - protein, 7 aa, synthetic construct
  REGION 1..7: note = n-mer motif
VTRSTKE

SEQ ID NO: 8300 - protein, 7 aa, synthetic construct
  REGION 1..7: note = n-mer motif
DVALRSN

SEQ ID NO: 8301 - protein, 7 aa, synthetic construct
  REGION 1..7: note = n-mer motif
ESDLRQR

SEQ ID NO: 8302 - protein, 7 aa, synthetic construct
  REGION 1..7: note = n-mer motif
PLLAANP

SEQ ID NO: 8303 - protein, 7 aa, synthetic construct
  REGION 1..7: note = n-mer motif
INAAHRP

SEQ ID NO: 8304 - protein, 7 aa, synthetic construct
  REGION 1..7: note = n-mer motif
ARRDVNS

SEQ ID NO: 8305 - protein, 7 aa, synthetic construct
  REGION 1..7: note = n-mer motif
SMDKVEK

SEQ ID NO: 8306 - protein, 7 aa, synthetic construct
  REGION 1..7: note = n-mer motif
NVSARET

SEQ ID NO: 8307 - protein, 7 aa, synthetic construct
  REGION 1..7: note = n-mer motif
LTTAGMW

SEQ ID NO: 8308 - protein, 7 aa, synthetic construct
  REGION 1..7: note = n-mer motif
ARAEGVF

SEQ ID NO: 8309 - protein, 7 aa, synthetic construct
  REGION 1..7: note = n-mer motif
PSDHMRT

SEQ ID NO: 8310 - protein, 7 aa, synthetic construct
  REGION 1..7: note = n-mer motif
SRTVILS

SEQ ID NO: 8311 - protein, 7 aa, synthetic construct
  REGION 1..7: note = n-mer motif
QSNAAEG

SEQ ID NO: 8312 - protein, 7 aa, synthetic construct
  REGION 1..7: note = n-mer motif
WTETAAH

SEQ ID NO: 8313 - protein, 7 aa, synthetic construct
  REGION 1..7: note = n-mer motif
KENQLSK

SEQ ID NO: 8314 - protein, 15 aa, synthetic construct
  REGION 1..15: note = Linker
GGGGGGGGGGGGGGG
